United States Patent Application Publication US 2022/0409675 A1 - sequence listing, part 2

SEQ ID NO: 20 - DNA, 67615 bp, Anaerostipes rhamnosivorans
tgtgagagaagatctaacatcagtgaaggaagaagtcacgtctgtgagagaagatctaacatcagtgaaggaagaagtcacgtctgtgagagaagatctaacatcagtgaaggaagaagtcacgtctgtgagagaagatctaacatcagtgaaggaagaagtcacgtctataaagaaagatgtaacttccctaaagaaagatgtacgggaactaaaagacagtgttactaaattagaaattacacaggaaaatgaaatactgccgcgtttaaaagagatcgagtcctgttatttagatacatacaaacgttatcaagaaggcaatgacgatattgaatctcttaaagtagatgtaacaacaattaagaactatttggcaaaggcaaattaatttttaactgcatatataaaacccgtgtaatgttgattttaacaggctcacacgggttgtttttatcttttacaattggaagggaaggaagtaaggaacatgacaaagatagatattatttcaggttttttaggagcgggtaagacaacgctgatcaaaaagcttttaaaagaggctttgggacaggagaagatcgttctaatagagaatgaatttggggagattggcattgacagcggtttcttaaaagaggcaggaatccaggtgacagaaatgaattccgggtgtatctgttgttccctggtaggggactttggcactgctctaaaagaagttgtatccaaatacgccccggaccgtatcatcattgagccttccggtgtcgggaaattatctgacgtgatcaaggcagtacagaaggaggctgagaattgtagtctttctctgaacagttttgtcaccgtggcagatgcaaaaaagtgtcagatgtatatgaagaatttcggggaattctacaataaccagatagaatatgcgggtacaatcattttaagcagaacagggcagctgcaggaggagaaacttcaaaaggcagtagaactgatcagggagcacaaccagaaggcggcagtgatcaccactccgtgggaggaacttgacggagaaaaaatcctttctgtgatggaggaagggaaccagctttcaagggagctttttgacaaggaagagatctgtccggggtgcggacaccaccatgagcacggggaggatcatcatcatgaacatgagcaccaccatcaccatgaacatgaacatggggaccaccatcatcaccatgcggacgaagtgtttacaagctgggggatagagacactgaagaagtttgaggaagaatcattggagaatatcctgaaacagttgtcagagaaagattccttcggtacgatcctgcgggcaaaggggatcgtggagagtggaaataagacctggattcactttgacctggtgcccggagaatatgagattcgccggggagacgcagattacaccggaaggatctgtgtcataggtgctaagcttgatacagaaaagatccaaaaacttttcgggctgtcataaggaggtgtataacatggaaatgccggtataccttatctggggatttctggagagcggcaaaacctcttttatcaaagacactttgggccaggagtattttgcggacggtgagcggacaatgatcctttcatttgaagaaggggaagaagaatatgaaaaagattttctggaggaaagtaattcctttgttatacaggtggatgatatgaatgatttctcaccggcctttgtggaaaactgtgagaagaactatcatccggaccgtatcatgatcgaatataacggaatgtaccagatcgaggatgtgatggatgtaattgatgagacgaatatggagctgtaccagatcattgttatggtggacgcatccactgcggagttgtatttgaaaaatatgcgctctatgatggtggaaatgtttaagatggccgatatggtcatatttaaccgctgtaccgatgagactaatgcatcttcctacagaaggagtatcaaggcggtcaaccggagggcacaggtgggctttgagcgggcggacggcagagagtttgagatgaatgagatgcttccatatgatccggaggctgagattatcaaggtggaagaggaggattttgggatctggtatatcgacgtcctagagcggcccaacgtgtatctggggaaagtcgtggaactttccaatgtgttcgtcagaaggccaaacggaattcctgccgggctgatcctgccggggcgttctgccatgacctgctgtgaggatgatatcacttttatcggtttcatctgcaaaatgcagcatgcaaagtcttcctctattaaaaaggtcaaggacggcacatgggctgttctcactgcaaagatttgcatggaaaaccataaggcctatggtggtgagcgggggccggtgctccaggcgctgcgtattgaacagggaacacagccaaaagagaggctgatctatttttagcagcatatggtaagaaacggagacaaacgtcggttatttggcccaaacgtttgtctctgtttttttctgggcaagatcgcagccaacacaaggttttttcaccacagattctctgatcttttttatactgaaagtgttaagaaaagcttacaggataaaaacaggaggaactagaatgaaaagaaaaagtgtgtggctgctggtcatcatctttaccgccgtattgtgggcaaaaggaggagattggtttcaagaggatatacagatccaaggtgatactccgaggcaggtatcaaatctcaagcagatttcagaacaaaatatatacagtgaatttgtcgtgctcgcagaacgcgggaccggaagggtcctgatgaataaacggggagaaaaaaagatttatcctgcgtcgttgacaaagatcatgacggtcctggtagctgtagaatcaatttcagatgacagcagggaaatcattatgacggatgatgtttttcacacgttgaccgaacagcacgcttctgtggcgggttttctgcctggagagagagtaaaaattagggacctctattacggcgccatgctgccgtcaggagcagaatgctgtatccggcttgcgaagtatctgtctggaaacgaagaaaagtttaccaggctgatgaaccagaaagcggaagaaatcggaatgaaacatacgaattttgtaaattcaacaggcctgcacgatccacagcatgttacaacagccaaagacctggaggtcctgctccgttatgcgttaaagaatccaaaattcagaaaggttttccagaccatgcagtaccgcacaggccccactggaaagcatccacaggggcttctacttcgcagtaccctgacaaagtataaaaatcagcttaaacctgagaacggcagtttcctcggcgggaagaccggatatacaagcgaagcgggactctgcctggcaagctgggttaagatacacggaaaggagtatcttttggtgacggcgggcgccagaggtgatcatcaaaccaagccgttacatgtactggacgcggaatctatatatcaaggattataggaagtctaaacagaaattcccctgcatacactgtaaaaacagagaatgcaggggatttttatgaaagagtacattgaagaacgcgcggtagaagtcggcaattatatcgtagataaaaaagctacagtcagacaaactgccaaggtgttcggaatctctaaatctaccgtacataaagatgtgacggaacggttggaaaagatcaaccagtccctggccagaagggccagagaggtactggatctcaacaaatcggaacgccacatacggggcggaatggcgacccgtggaaaatacgaaaagattaaaaaaaatacaaaagcaattcaggggtgaattgcttttgtatccttttgggtcagcggccggcgttggcatttcccgtctggttatgtagcagctgttcattgtatttcagaagagaggatatcggtttggacagtgtcagatattgtcttgtatggcatctgaatgaagatgtcttctgagcgtaaagcttctggggagaaaagaaatcagagccttcaaacggcgtcctcttgatagaaatatcgatcacaatgtctaaaaaccgattctggtgaaagatcttcctggtacactcctttttataggtcggatgaagcttattgatcgtgaactggaaatacagagaattcatcgccggctcatcactttccagcagaaagcgataatcgccgttcagtatcttttgcacttcttcctgggtcagagagaactttgtcttattggccacatgtccattggtctggttttgaataaagaaaaagttggtgtggtcttcttcgtagatataatagcggatattgggttccttctcaaccccttcaaacatcagaactctgacaggcatgctgatcatgtacttttcaggggaggcagagagcagatattcttcctggatcttttcgtattctgcctggctgatgttcttgttcacttctgtataagaaagcttttctactaatattttacccataataactccaatgcgcagttttggttttttgtttcttatcaatatactagtgacattatatcaaatcgtgcctataaaatcatgacttatttctaaaaaaagtcttaaatttgcgtggattttcatggtttcctatgttaagattaccaaaaaggaggagctatggatttatttgattatgcaagacagaaaaacagcaggaaagaagctccgctggccgggagaatgcggcccaaatcccttgatgaagtcgtgggacaggagcatattataggaaaggacaagctgctttaccgggcgattcaggctgacaagttaagctcgatcatcttttacgggcctccgggtacgggaaaaacaacactcgccagagtcatcgcccagacaacccaggcaaactttgtccagatgaatgccaccacttctggcaagaaagagatgcaggaggcagtgaaggaggccaaggaagccctgggtatgttccaaaagaaaacgattcttttcatcgacgagatccacagattcaataaggcacagcaggattttcttctgccctttgtggaggacggcacgatcattctcatcggcgccaccacagagaacccatattttgaggtgaatcaggctttgatctccaggtccaatgtctttgaactaaagtccctggaggcagaggatatcaagaaactgctcataagagcggtgaacgatgacgaaaaaggcatggggatctatcgggccaagattacggacgatgccctggatttcctgtcggatatggcggagggggacgcaagaagtgcgctcaatgccattgagcttgggattctcaccacacagcccggagaggacgggaccattttgatcgatatcgacgtggcccaggaatgtatccaaaagcgggtcatgaggtatgacaaaggcggggacaaccactacgatattatttctgcctttattaagagtatgagaggatcggatcccgatgccgctgtttattatctggcccggatgatcgatgcgggggagagcgttacgtttatcgcccgcagaatcatgatctgtgcctctgaggacgtgggaaatgcagatccccaggcacttcaggtggctgtggcggcctcccaggccgtggaacggatcggtcttccggaagccaggatcattctggctcaggcggtgacttatgtggcgggggccccaaagagcaatgcggcttatatggctgtggatcaggcgcttgacgctgtgaggaagaaaaagaatggaatggtaccgaatcacttaagagattcccactacaagggagcctcaaaactgggcaggggcatcggataccagtatgcccataattttcctggccattatgtaaaacagcagtatctgccggatgaacttttgggaacggtattttatgaacccacagataatgggtacgaaaaatacattaagaaatacctggacagcttaaaggaggaataagccatggagaatttacaggatggatatctgcttagaaacggaataaagattccgtgtatcgggttcgggacctggaagtctccggacgatgtggtctgcgagagtgtgaaagtggcaatcgaagcaggctaccgtcatattgacggtgcggcggcctacgccaatgaagcaggtgtgggaaagggaatccgggagagcgggataccgagggaagaactgttcatcacgagcaagctgcccaacgcagatcacggatacggaccggccaaagaatcctttgaaagaaccttaaaccagatggggcttgagtatctggacctctatctgattcactggccggtggtcattgagcataaggatgattttgagcaggatatactggacacctggagagcatttgaagagctctatgaggccgggaagatcaaagccatcggtgtcagcaactttatgatagagcatttggagattctgaaaaaccatgctaagatcatgccgatggtcaatcaggtgcagctccatccgcagcacccccaggaggagatggtaacctactgtaagaaaaatgggatcgtgccggaagcgtggagcccgctgatccagggacaggcgttcaagagagaactgttaaaagagatggcccaaaagtatgaccggacggttgcgcagatttgtctcaggtggatcatgcagaaaggggttgttcctcttccaaaagcatccagcatagagcggatcaaaggtaatgccgatgtgtttgattttgaaatatctaaagatgatatggaggagatcgccacactcaggtcgtatggaatgatcggggatgagccgaacataccgagaacaaaacaagtggttggattttaaaagacagaaggagtttcccgtaaactgagaagctccttctgttttatttttgtccttttttatagagaaagatgagaacccacagcagcagcggatagaaaaacatcagtgccagcatgccgaaaaacgcccggcttccggtaaaggcacagtatagtgtgaggcctatgaccaaaaggatggacagtatgacaagaatggacagtattctttttgttgtctgtttcatagtgtgatcctttccaaaaccaaatccttcaggtgatcctggtcaggggcagcaaggccgtgctccatgagatagggaaaaaggtccagttcatgaaacagatccagaagctgttccatatgtccggcgtctgaactaagcattgggagcatcgcctgataatctggaagactggctgcagctttgttgatgccgcgctggttgtaggtgaaggaaacctggtagtctgcgatgatatcttccctttctgcaccgagcagggtcaagagtacagcggaaaggacaccggtccggtctttgcccgcgctgcaatggaataagacgccgcctttttctaagccttgtatgacagtctttactgcagcagctatgagttcaggactgtcagtaaccattttttgatatccgtcagcgaggcttttggtgaaagctttggcagctgactcagaagcatttgaaaaatcaatttcttctttttgaagcgggcagtgaaaatactgcatagtttccgggacctgatctttcatgagttctgcctcagatctgctgcgcaggtcaaccacggagacgataccgcagcgtaaaagcttttgccattcttctgaagtcaggaaggaaagacagtcaccgcggaacaggcggttccagcggaccagggagccttctgtggtttccaggccgcccaagtcccttatattaaacgcatgatccagacgtattctttttatgttgtgcaattgataacctcccatctaattgatttgattcttctattctaataggtagcccaggaagatacaagaggttatattttataaaaaatataactgaatctaaaagccacctggtttattgatccaaaataagcgcagaagcttcatttattcccagactgacaagatgatctacagcaaatttgatctcgtgttccatcagctcttcaaactttgaagcaaatccaactgcatcaaaacgctccagagattctaaaaagaaatcaaagtaggggagataaaaagaagtgtatgactgtggatcctttaacatacctcgcaggggatggccccaaaataactgttgaaagagttctgtatatactgttctaactgccgtcaaaggagcatcttgggataacagagacagaatagtataaggaacaagttcctgccgatgtacttgagcgattgctgttaactttaacttccatttttctatagaatttttatccattgaagatattgtggcctcaacgatctgcctgcaggaaagggttagaatatgaaggcttttggcataatcgaaaagcctttttctgacagtcggttgagataaatcacagtattctgcaatttgttcaatcggaaggacctgagtgcctacaccgttgatcgatcttgtcacaccgatgttatttagcagggaaaacgtacggcggactgtgttgatagaaacttgtttttcttttgccagtgtctttaaagaaggaagaaaagttcccggaggataataaccatgattaattgcgattaacagttccatacccagtgaatagcagatttgtgaggccttttgataactgctccagatgaagggaatctgttgtttggaagttgaaaatagattcctgtttttataaaaatttcttaaagcatggtatttttgttcttgatatatttcagtagaggtcctgagcaattcccaattttgatccctgcataactgagtcatttgtagcagagactcctgttctgtagtgagatatttcagattacctgggacactgaaaaagggtgttagaaaaaacataaacacctgccacacgaggcgcatgagtaaatcattgcccaatgcaccatagatgaactgatgttgtaggatcacaatataaggtgaaagattctcatcctgggtagataattgttccaaataatctaattgttttgaggaaatactttttaaacccagccattgggctttgctgaacagcagccgcatggaccggctcaggtctaacagagaatttttatgctcggcaagaaactgctggacatatgtctcaatttcctgttcactgtattgtacttttaccttgactccgatgctcttggagattgtgatgtaaccatcacttgcaagatgctgataaactgtgcggatcgttcggaccgagacaagaaaatactgagatgcatcctctatagtaggcagacgatcttcaaaacggtaggcaccaaatctgatctgtatttttataacgttatagattacatgctgtaactctaaatggtttttcacaccgtttatctccaatcctttatttactaattcctttttatgcagacagtatatcatttttttgctgatagttctataaaaggaccttacattttttacagtttgttgctatttcagtattactttgctatacttaatattaaataaccatatggacaaggtggaaatattggcatggtatcactgccaaggcaaatatctaaagaagccatttggcaaccataaattttcagtcaaaataaagggacaatttgggaggtgaatccatgaaaagatggaatagaggattgattaaagcgcttattcttggaactcctattgttctattgttggcagtctgggtatatatcaatgaactatcgcatacaactgaggcatcagttattgcttccatggaagaattatccggacatgacatgcagaatattcaaagtgaactgaaaagttcgtggaatgaactctcagctgtttatggcagaatccaagccagccggtgcgatacagtacaggaagtgtgtaagcgcctgaatattgaacaagtgtccaatacctatgacaagatttttttggtggattctgaaggaaatacctattccagtacaaatgcagttcaaaacagcaaggataaagcttacataaatccattgctttctggtgaaaagaagtttgtgatgagatatgacgagctggatattttggaagcagttaaggaaaaccttgtttatggcacacggtgtgaaccgcttgaggtagacggcattcaatttattggaattataggcttttcaaaaattaatacgatccaggaacgccttaagattgacagctttgatggacgggggtataccggtattgtagatatggaaggtaattatgtcgtaaatcctgaccgcagcgcaggtatcgggagaattgacaattattttgaacaagtccaaaaaaatgcaaacttgtcaaaacaggaaattaaacaaattaccgctcggcttaacgaggggaaatcatttatcgagcattttgattataaggatcaaggtgctcaggtggtgtcctttgtttccatccctgatacgaaatggagcattgtactgacagttcccgaaaaagcgttcagtgaacaaacgaatcaatttgtaatcatgacgggtatcatgcttgcagttgttgtggtcgctctgtgcttgatgatgttgattatcatccgtacattaatggtttctacaacagcaaaggcagaggcaaaggccaggggagactttctctcaagcatgagccatgagatacgtacgccgctcaacggaatcgttgggttgaaccatttgatgcagcagaatattaaaaatccggcaaaactcaagggatatattgaaaaatcggattcaactactaagtatctgctttctctcgtcaatgatattttagatatgtcaaagttacaggaaggtaagatggagttgattctgaggccattttccattcacagcttaatttctacaatcgaaacgattatgtacaaccgtatggaagataaaaacattgtttttcaagtggaatcagatattcaaagcccatacctcattggagatgagatgagaattgaacaaatactgataaacattctcggaaatgcggtgaaatttactccggagtacggtcacattacgctgcgtgtatatcaatctgcattgggatctaaaagggtcaaaacgacctatgaggtggaagacaccggctgcggtataagcgaggaattccagaaaaaaatatttgattcgttcagccaggaacacaataccgtttcacaaggtatgcagggcacaggactgggaatgtccatcagctctttgctggtaaagcagatgggaggaactttatccgtcaaaagtaagcttggccaagggagttgttttatatttactatggatggagatgttacggacggtgtatcagagagtataccaacaaaagaatgttcgccagcaaaagaaaaaaaagaaaggagtttaaaggttttaattgctgaagataatgatctaaatgcagaaatcttaatggagatgttaagtacagcaggatttaccgcgacccgtgcagccgatggcggacaggttgtggaaatgttcagagactcgtccctttatgattttgatgttattttgatggacgtaaagatgcctgtcagaaatggctatgaggcaacaaaaacgatccgtatgctgaaccggccagatgcgaagacggttattatctatgcctgtacggccaatacatttaaggaagatcaggatatggcactggaaagtggaatggatggctttattgcaaagccaattgacgtccgtaagctcatggagaaactcaacaagataaagtgaaggaggaatgggtcaagatgaaaagatggaaaaggattctagccggaggattgctgtttgtaatgcttctaagtattatgtctggctgtacagccaaaaaggcagagaaaaaacaagtgacgctgacgattaaacttccgccgcttacggtggcaaatgcagacacagatgttacagatgcttatgatatgctggttcaggcaggcaaagattttgcggctcagtataccgaagctgaggtcacggtaaatgtagtaaagtttggctatactgaggaggatgaatatatcacaggctgttttgacaagaaagatgccgctgatatattgtttgaaggctattttaatatggctggatacattcatacagggcgcgtagtgcctctagatgacattattactgataaaatgaaaaatgatcttgacagtacggtaatgaaaatgagccaggtgaacggtaaaacctatatgcttcccttctacagtctacaaaataccctgtgctttaacaggaaaattttccgtaaatgtggactggacaagtacataggcaaagaaggggaaatccagagctggagcctcaaggactgggaaatcattctgtccacattaaaaagaaaactgcctgagatgtcttatcctatgctgatgtatgccaaaaacgatcagggtgacacgcatatcatgacattgttacgcagtcagggcagcaaattttttgataaaaaaggccgtttccatgtgaataccaaagagggggtcgctgcactcgagtggattgttgattcgtataaaaaaggatactttcctgagggatgtgaaaatctagagattaatgactgtaataatcttttcctaaataatcaattagcaattgaccagacaaatagtgccactgcaattaatatggatttaaaaactacgggttttgttaattttccgagcaaaaacggaaagggatataatacttcctttgtcactggatttgaggtttttgacaatggagataaaacaaagctaaaagcagccaaggaatttgtaaaatatttttattccaacgatgaattaatggattatgcacagattggccttccttctagtgctgccactacaaagcgtgtaagtgatcatatctttatgcagaaggcatataacgataacatctctaatacagtggattttacagcaaataatccgaattggcgcggcgtgcgtgacgtattttacaaacatattcataaattacttaccggggaggaaagtccgaaagcggcagcaaaagcaattgatacagattgtaatgcggcgattgaggaaggatggaaaaacagtaagctgcataagtaaaataaaatgtacctagataggtctggcatttatcagatgtccggaagtaccgctgatggtacagatatatcaaaaaaacatgcagaaagccctgtaacccaaggctccctgcatgtcaaggggaggataagtaatccaatctctcgatcagacattaacagtatgtcctctgtaattttttttattcacagattgaaaaaatattttaaatttgttatagtatcataagtatcacgaaagcaatataatcaattaaaggatggataaatcatgggattactacaggaatggcgtgactacgcatataagtttgacgaccgtacacaggaagggcagcagttctggctttcttatttcggaatagaaaaagagatttatgtaaaattattatcagataaagactctgtggaaaaaggaactgtaaaagagctggccgaaaagtatgagacagaacttcagttttttgtcggatttctggatgggatcaacgacagtctgaagactccgaatccgatcgaagagatggaagaggatacagaggtaaccttggacattgattttgagaaattatactataacatggttgcatgccgcgcagaatggctgtatgagctggagcagtggaatgacatcctgccggaagacagaagaaaagaattatataaggaacagaagtcatccacaacggtcgtaaaaggcgaaaagatcggaaggaatgatccatgtccttgtggaagcggcaagaaatacaaaaaatgctgtggaaaaaatgcataagagattataacgcccgaaaagttgtcaattcagattggcagctttttgtttataaaaagaaaagggtaagaaagatgaaaaaagtggaagataatattacctggagaaaacttgataacacggcgcagctgtttcctgtcattgcaaacaaggagatcagccacgtataccgtatttcagcaactctgaagaagccagtgcagccagagcttcttcagagagcattggaggataccctgccatggtttgacgtgtttagagtacggctaagaagaggattcttctggttttattttgaggagaataaaaataaatctgaagtagaagacgaaacagagtatccatgtcggtatattgatccccatgggaggcgaaaatttctgttcagagtctcttattacggaagacggatcaatctggaggtgttccatgcggtgtccgacggcatgggagccatcacctttttaaaagaacttacgtaccgttacattgacctgtccaagagacagagcggcgagaaaatcgggaagtatcgtccaagcgaagaatgtattcttgaccaggaagacagctatataaaacattacaggaagaaaaaagggaaaagctacagcaccaagaaggcatatcagatcagaggacggaaaatttacggatctgggatcagtgtgatccatgggtatgtggatttaaaggatttaaaaaaaacttgtaaaaaatataaagtcagtgttacaaaatacctgacggcagtgttgatcttcagtatctatgaggaatatttaaataggcaggaagaaccgcatcctatatgtattaatctgcctgtcaacctgcgtgcattttttgattccagcacaacaagcaatttttttgcagtaactctgattgaatttttctcccatggtgagaagcacacgtttgaagaagtactctctctggtcagtcagcagatggatgaaaagataacaaaaactaaaattgaggagaccttggcatataatgtagctgcacagaagaatcgcctgatcaagatactgcctttgttcatcaaaaaccttggactcagttatacgtttcggcgatccagcaaatcagctacaacgacattgtccaacctggggcagatcaaggtgctgtctgaatatgaaaatgaaatcgaacagttccacgtgatgatgggagtctttaagacccaggagatcaaatgcgccatgttaagctatcaggaccaggctgttatcacatttacgtctgtattccaggaaagctatctgcaaaaagcatttttcaggaatctcacaagagaaggaattaaagtatcaatagaaagcaatggggtaatcaatgaaaaggtgtaagagctgccaggtggaagtcctggatcatacagtgacatgcccgctctgcaacagggttctaagcgatgacggaaagggtttcactcctgagagaatgtacccggacccggaggaggacagaaaaagactgtatggaataaaaaatattttttttatcctgcttggtatgatcgcagttttgatgggaatcatcaattatattacatataatggattcctgtggtctgtgatcgtcctggccagtattttatatctgatggtgactgtatcttattccatcgttcacagaaggaatctggcggccaagatcgtcgtggaagtgatcggcgggggaatcctcgtttctgtcattgactacgtgatcgggtttgagggatggtctgtggcttatgtgatccccgggctgatccttactgcggatctggctatggtagtcctggttttagtcaaccggaagacgtggtacagttatctgatgtacctgatctttattgcggccttgagcctggtcccggtggttttatacctgttcggcctttttgaacagccgctggtggcattgatctcctgcgggatatccgtgctgacggtctttatcattctggcggcagggaacaaaaaagggaaaaatgagctggcccgaagatttcacacttgatatggaaggagcatacaatgaaacgagcaagtttccgcggacagatggccgttcaatgcatcagaggatttacagcgacaccccgcggcaggacttatgccacaggaatggggcatcagaatccagaggaataccgatggagatgtccgaagggatatacgaatgaaaagctttcagggggagaatttcggatggaatttctctcgccaaaacagaacaaaaatgacacggcagtgttgcagcttcacggcggcggatatatcggcactctgagaaatgcataccgcagggcggccgtccagtattctgtctgcagcgggggaggaagtgtcttatctcctgattacagagtggtgccaaatcatccgtttcccgctgcgctggaggatgcggtttccgcttaccggtggctgctttatcagaagggatacgctccggaacggattgtcgtcgcaggggattccgcagggggaggcttagcgctggctctcggaatgtacttaaaagaccacagtcttcctatgcccggaggatttatcgccatgtcgccgtggacagatctgaccttgagcggcgaaagccttaagtataactacggaagggatcccctgttcggaagatcgaaggtgacgatgatatatgactccctgtatccgggagagcatgatgtgagggatccgtatatttctccgctgtttggggatttccatgggtttcctcccatgctgtttcaggcaggcggcagggaagtactgctggatgacacgctgagagctgccagaaaagccagggagagcggagtaccggtgagaaccagcatttatcctgacatgttccatgtgtttgaactggcaatgggcctgttcccggagagtcaagccgcatggagagagatcagagcatatttcaaaaaaacgctgggaacatagtttggcagaaatgtcacggaatgttcacaaatctgttcttgtatttttaaatgtgctgtgctatgatatcgattagtcaactaatgattagacaactaatctatctggagaggaaagaaaactcccagcttataagtggaggataagaaacattttaatcttttgaaaggagatatcatgtatgaagatgacggcatttatcatttgctgctgaagataaaccataaaaattttgcaattggatttgcctatttgaaagaggccgggctgcatccggggcagatgcctctgattaccagcctttacaaaaaagaaggggtgacccagaaggaaattgcggataaattaggaattaagccttccaccatcaatgtgatgatcagaagacttgagaagaaagagtttgtcatcaggaagcaggacccggaagaccagagaaggagccttgtgtatctcacggtacacggccgccagatttatgaaaagatctccggagccgccgttgatattaaagatcaggtcatgaacacctttacggaagatgaaaaggaagaactgttccgcctgctcacaaagttttatgaggggctggagaagttagttgatttggaaatgggaacttgtaaatgtaaggaatagtcgtagaaaggagacaacatgctaaaaatattccgatatctgaaaaaagcgtatatccctattgcatgtattgttctgcttttatgtgtgcaggtcagctgtgaactgacgatcccgacctatacgtccgatatcgtcaacgtcggaattcagcagggcggaattgaggacgcagttcccgacgccatgcgtgaagagacaatgcaggcactcgttggaatgatgaaacaaaaagatgcagacaaagttaaggatgcctatgagctgtacaccaaagatcaggtgaagcactcagattatgactcctataaaaaaggccggctctacgtgaagaaaaatatcagcaaaaaagagagagaggaactggatagggtcctttccaaacctatgctgatgctggaaatgaaaatgatgcagcagagcggacagagcaaagaaaatgcgaaaatggcccagaaattcaaaggaaagagcattgatgacatgccggacagcattatcagccaggcagccatctcctttgtaaaagccgagtacaaagctatgggccttgatctggaccagatccagaccaactacatgttaaagaccggagccatcatggtggggcttgcactgctggccatggccgtggccgtgacagttgtacttttatcagcaaaactggctgcaaggctgagccggatccttcgtgaccatattttcaaaaaggttatggattttacaaactcagagtttgacaaattctccacagcatctctgatcaccaggagtaccaatgatattcagcagatccagatgtttgtgaccatgatgtttcggatcgtggtatttgcaccgctgatgggtcttggaggtatctataaggtactgaagaccaacgtcaatatgacatggaccatcgctatcggagttgttgcgatcatgactgtgatcttggtattgtttacggtagcgatgccaaagtttaagtctttacagaagctgattgaccggctgaatctggtctccagggagatcctgacgggacttccggttatccgtgcattcagcacagaaaagcacgaggaagagagatttgatacagccaataaaaatctcatgaagacgaacctgtttgtcaacagagccatgacgtttatgatgccgctgatgatgctgatcatgaacggactgacggtgctgatcgtctatgtgggggcagacaacattgatctcggaagaatgcaggtaggagatttgatggcattcatccagtacgctatgcagatcatcatgtccttcctgtttatttctatggtatccatcatgatgccgagagcacaggtagcagcagagcgtgtcaatgagattctggatactgagatcatgatcaaagacccagaacagccgaaagaatttatcaaagagaaaaagggagaagtggaatttaagaacgtatccttccgctatcctgatgcggaagaagatatgctgcacgacatcagttttacagctccttccggaaagacgacggcgtttataggaagtacgggaagcgggaaatccacgctgattaacctgatccccagattctttgatgtgaccgagggaagcatcctagtggatgggaccgacatccgcgatgtaaagcagtcagacttgagagacagacttggttatgtaccacagaaaggtgtgttgttctcaggaaccatagattccaacttacgttatggaaaagaagacgccacggaagaacaggtgaagaaggcggcaaggatcgcccaagccacggatttcattgaagaaaagaaagaggcatatgattcaccgatcgcccagggcggttccaacgtttccggaggacagaagcagaggctttctattgccagagccatcgcaaaggatccggagatctacatttttgacgacagtttttctgcacttgactataaaacagatgtaactctccgtcaggctttggccagggaaactgcgggcagcacgacgttgatcgtggcgcagagaatcagcaccatcctgcatgcggaccagatcgttgtattagatgagggccgtgttgtgggaaccggaactcatgaagaattgctggagtcatgtccagtctacttacagattgcaaaatcccagttgtcagaggatgattttgcaaaagcaagggaggtggcagaacatgagtaatcagaatagaagacccggcagaagaatgggccatggcccgatgcagggcagcggcgagaaggcaaaagactttaaagggaccattaaaaagcttttaaagtacatgagacgctactatgctgccatagcttttgtcatcttatttgccattgccagtaccgtgtttaatattgtaggaccgacaatcctgggaaatgccacaacagagatatttaacggattggtcaaaaaggtccagggaacgggcagtattgatttttctaagatcagaagtattttgcttatgctcttaggcctgtatcttacatcggcggcattttcattcctgcagggactgatcatgacgcatgtgtccaataatactacctatcagatgagaaaagatatctctgaaaagattcatcgtatgccgatgaaatactttgagagcagaacgttcggagaagtattgtcaaggatcaccaatgacgtagatactcttgggcaaagcctgaatcagagtatgacccagatcatcacgtcaatagccaccatcatcggtgtgtttgtaatgatgatcaggatcagtgttccgatgactgtagccgttgtcatcatccttccggtctcttttctgatgatcggagcgatcatgaaaaaatcccagccttatttccaggcacagcaggcgctgctgggggaagtcaacggacaggtggaagagatctacagtggacacaacattgtaaaagtttttaataaagaaaaaagtgttgtggaagagtttgaaaaagtcaacggaaaattatataattctgcatggaggtcccagttcttttcaggggcaatgatgccgctgatgcagtttgtgggtaacctgggttatgtggtcgtggcgatcctgggcggattcctggctatcaaaaataccattgaggtaggccagatccagtccttcatacagtatgtgcgaaactttacccagcctatcacccagctggctcaggtcggcaatatgatgcagactacggcggcttccgcggagcgtgtctttgaattcctggaagaggaagaagaggctgaagtagacgagaacccggtggatgtgtcttcactgcagggaaatgtatcctttgaacatgtatcctttgggtataatgaaaaccagaccatcatcaatgatttctctgtggaagtgaaggagggacaaaagatcgctatcgtaggtccgaccggcgccggaaagacgacattgattaagcttttaatgagattttatgatgtcaacagcggttctatcaagatagacggccatgacttaagagagttcaagagaagcgatatccgccagatgttcggaatggtgctgcaggatacatggctttacaacgcatctgtccgcgacaacatccggtacggaaagcttaatgccagcgaagaagagattcagggagcggcgagagctgcatttgcccatcattttatcgagacacagccgaaaggttatgatatgataataaatgaggagagcaataatatttcccaggggcagaaacagcttctgaccattgcaagggcgatcctggcagatcctaagatcctgatcctggatgaagctacaagctctgtagatacaaggacagaggagcggatccagaaggccatggataatctgatggagggaaggaccagctttgtcatcgcccatcgtctttctacaattaaagatgctgatgtgatcctcgtcatgaatcacggggacatcgtagaacaggggaatcatgaggaattgcttgccaaaggcggtttctatgcgaacctttataacagtcagtttgaaacagcggactaggagggatatacatcttccagtcctgaaggcctccggcacgttggtgttttttgcaccggcatgccagaggctaaattgcatttatcacaaggagggaattatggtacgtttagcgtgtataggaacgaactttatcacggattggctgatggaaggggtccaggaattagacgggatcgaacttacagcagtctattcaaggaccatggaaaaaggaaaagaatttgcgggcaaatacggggtagaaaaagtatatgacaattttgaagaactggcaaaggattctgatattgacgcagtttacgtggcaagtcctacatactgccactttaaacatacgatgatgatgctgaaccataaaaagcacgtgctctgtgagaagccggtggcgtccaatttaacggaattggaactgatggtaaaggcggctaaggacaatcaagtgatctttatggaggcgatgaagtctgtacatacacctggatacaaggcgatgttggagcatcttccgaagctgggagctattcgccgtgccaccatccagtactgccagtattcttcacgctatgacaagtttaagatgggcatcatcgaaaatgcatttaagccggagctttccaatggggctgtcatggatatcggggtatactgcgtgcattttctcgcagcattgttcggtatgcctgataaaatattggcggatgctatatttttggacaacggtgtggacggagcggggacgatcatcgcttcctatggggacaaacaggcggaagtcatctattcaaagatcacaaattccaaacttcccacccagattcagggcgaaaagggctgtatgatcatttctgagtgcccgaacccacaggagatcaagatcttgtacaatgacggtacagaagaattccttgagtttgaaagccgtgaaaatcctatgaagtatgagacagagacatttttggaactgatcgggacaaatcaggtagaccatccgtatttggaggcctccgtcattgaaatgaagatcatagatgaagccagacggcagaccgggattgtatttccggcagataaaatcagagaacagtaaaggagccatattcatgaagaagaaactgatcgcaggagggctggtattgactatgtttgcgcttgccggatgccagactgcaaagaaacaggataaaacagagaaagcaaaaacgactgcggagacttccacagaggcaaaggtgctcagcaaatataaagagatcaagatcaacggtgccaaaaagaccgtgcagatcggagagccttccaagggagagacggtagcggaagtaaaggtcaaaggatacggaacaatgaagtttaagttctttttaaaggattctccattggcagtcaaaaacttccttactttggcggctaacgattactatgacgggatcattttccacagggtcatcaaagattttatgatccagggtggagacccaactggaacaggaaaaggcggacagagtatctgggggaaagagttcaagaacgagacttcagattccttgattccgttaaggggggctttatgtatggcaaatgcagggccggatacaaacggaagccagttttttgtagtgcagaaccgagaggtcaccgatgagatgctggattcttctcctgtggaattgaccggagaccagaggaagctgtttaaggaccagggaggatacccgtccctgactggggattacactgtattcggacagttatatgacggatacgatgtgctggataagattgcgcaggcccagaccgtctcggatacgaaggctgagaacaagccaaaaaaagatattgtcattgaaaagatcacggtaaagaattactaggacacaaccggggagggacagatgcttaccatcggactggaccatacaaaaaaagaaccgctgtacaggcagatctatgcctatatccgggatgaaatacgaagcggggctctgccctgcggctcaaagcttccatctaccagaagactggcaaagcatatggacttaagccgcaataccattgatctggcatacgggcagctggcggcggagggttatatcgaggcgcagccgaaacggggatattttgtctgtcaggtggaagatctggccgcgtttcatataccggtggaggcagaagacgaggagtttgtacagcaggaggaaccggcaccctatgatttctctccggtgggagttgacatgtccctgtttccctataatgtgtggaggaagctactcaaggaagtgatgatggacgacaacagtgagttgtttcaaaagggagaaaaccagggagatatggacttgaggcgtgccatcatgtattacctgagacagtccaggggtgtgcacgtggctacaagccagatcgtcataggagcagggattgagaaccttttgttccttctaaggctgaccctgggcaaggatcaggtgatggccatggaaaatcctgcttatctgaatgcataccggacaatccgggagctgggatttcaggttgttccggtcaatatggacgaggaagggctgaagatcacggaacttgagcgaagcagcgcagatcttgcctatgtgacgcctgctcaccagtatcctaccggtgtggtgcttcccatcgggagaaggagccggctgatcaaatgggcacgggaaaaggatgggcggtatgtcattgaggatgactacgacagcgaattccgctactatggaaaaccaatacccgccctgcagggcatcgatgagagtggaagagtcatttaccttggaaccttctcaaaagccattgctccggccatcaggatcggatatatggtgctgcctaaaagtctgatagctgcatacaagaaaacagcagggaatttctcctgcgctgtatcaagaatcgatcagcgggttctgacctcctttctatcagagggacattttgaacggcatcagaaccggatgagaaacgtctataaagaaaaacatgatctgctcattcaaaagcttaaggaaattgacagctcgatcacagtttatggggcaggggcaggccttcatgtgcgtgtggatttccacataaaggatacagagtggtttgaacaagaactgctgaacagaggagtcaggatttacgccctttctctgtattatatcgagggctgtcctgagagagagcagtacattttggggtttacgaaaatgcagaaagaagatatgataaagggactggagaccatccgggaggtatatggactggcaaaagaccgattggtatgcgaaatgacaaagaaatgaggtacatgaaatgtcggaagaaataaaggatacagaattagaagaaaaagaagtgcctgcagagaccacaaaagaggatgatccgcatgatgtggaacactactgctatctgtgccgcagaccggaatccgtaacagggaagatgatcactctgccgaaggatatccacatctgcgtagactgtatgcagagaaccatggacagcatggggaacggacagttcagctttatcgatgcatccaacatggatctgaacaatatggatctgacccgtctcatggaaaatatgcaggaaccgccgcagcaggcagtgaaaaagaaagagaaaaagaaaaagaagaaggaaaaaaaggaattagatcttagagatatcccggcaccccacaagattaaggcgatgctggatgaatatgtcattggacaggattatgcaaaaaaggtcatgtccgtggcagtatacaatcattataaacgtgtggtaaccaacacgatggatgagatcgagattgacaagtccaatatgctgatgatcggacctacaggttccgggaagacgtatcttgtaaagacattggccaggcttctggaagtgccgcttgccatcactgatgccacttccttgacagaagcgggctatatcggtgacgacgtggagagtgtgctgtccaagcttttgcaggccgcagacaacgacgtggatgaggcagagcacggcatcatctttatcgatgagattgacaagatcgcaaagaaacagaataccaacagccgcgatgtcagtggagaatctgtacagcaggggctgttaaagcttttggagggcgctgaagtagaagtgccggtaggtgctaccagcaagaatgctatggtgccgatgacgacaatcaatacaaagaatatcctgtttatctgtggcggggcattccctgacctggatgagatcattaaaaagcgtctgatgaaacagacatccataggttttcacgcagatttaaaggataagtttgacaaagatgaaaatattctctccagggtcacagtggatgacctcagagaatacggaatgataccggaatttttgggcaggcttcctatggtgtttaccttagagggactgtctaaagacatgctagtacggatcttaaaagagccaaagaatgccatcttaaaacagtatcagaagcttctggaactggatgaggtggaattgatctttgacgaaagcgcgctggaagctattgcggaaaaagcgctggaaaagaagacaggtgcccgtgctttaagggcgatcatagagaagtttatgctggatatcatgtttgagattccaaaggatgataccattggaagagtgatcatcaaccgggattatattcaaaaccatggtacgccggtgattgaactgcggggacaatagacaaaaaagccggatcatttgatctggcttttaattctattccataggaaagttcttcgaacctccctatggaacaaaaaagccctgcgggcattatgcacacaaatgcgtgaggaaattatttgaccaagtcaaatcgcatttagcgcccaaagttgtcaagcacctcaaagagtgaggggctggggagatgaagtgggcttgcccactttgttccttatgatagacagatgtacagaaatttttcttcgcagatcagatagcattatatttttactaaggagatgatataataagatcatggaggattgtgtatgaatgatttaaagtatttaaaagagctgtccaagcagtaccctaacatttctgcagcttctgcggaaattattaatttgcaggcaattttaaatctgccgaaagggacagaacattttgtgtctgaccttcatggagagtatgaaaaattcagccacatattgaggaacggatccggggccatcaggggaaaaattgatgaccagttcggcaatatcctgagtatgaaggagaaaaagaatttggcatctgtcatttattatcctgagcagaagatggatcttatggaagaggatttaacggaagaagaactggattcctggtatcggactacactgatccgtttgattttaatggccaaactggcagccagcaagtatacaagatctaaagtaagaaaagctatgcctccggtgttcgcatatatcatggaggaattgatcacggagcatggaatgctggacaaggatgaatattttgaccagatcatcgagacgatcttaaagaccggacaggtaagggagttgatcgcggctctgggacatctgattcagagactcaccatcgaccatctccatgtgatcggggatatctatgacagagggccgggagcacaccgcatcatggactgcctgatggattaccactcactggatatccagtggggaaatcatgatattctgtggatgggggcagcagccgggcatggggcgtgtattgccaatgtggtaaggatcagcgcaagatacaataatcttgatacactggagaacggatatggaatcaacttgattcctctggcacggtttgctctggattgttacaaggatgaccaatgtgagctattcagagtttccggggatgttcaggaagaggacgtcagagaattggatctcaataaaaaaatgcacaaggccattgccgtgatccagtttaagctggaaggacagctgatcaagagaagaccggattttggtatggatgatcgtctgctgctggacaagattgattatgacaagggaaccatctgtatccagggtacggaatatcctctgaaagacgctctttttccgacgattgatccgaagaatccgtatcagctgaccaaagaagaagagtacgtcatggagcatttggtcacatcatttaaatactgtgctcatctgcaggagcatgtgcgttttctcttttcaaagggaagtatgtatcttacatataacgatatggtgctttaccatggctgtgtaccgctgaatgccgacggaagttttcggcaggtgaaagtcaacgggaaaaagtatgcgggcaaggctctctatgatgtgctggaacaccacgtccgccagggatattttgagcaggagaattcctcaaagaggaaatatggacaggatatcatgtggtacatatggtctaatgaaaactcaccggtatacggaaaagacaagatggctacctttgaacggtattttgtggatgatgcagatctgaaaaaggaaacaaaggattactattatcatctgatcgaggaggaggcagttctataccagatactggaggagtttgacgctgacggaacgaaaggacatgtcgtcaacggccatatgcccgttgcagtaaaagacggcgagagccccatcaaatgtaagggcaagctgttcatcatagacggaggtttttcaaaagcttaccagaagaagacggggatcgcgggttataccctggtttccaattcttacggaattaagctggtagcacatgaaccttttaagtccagggatgttgtgatcagagaagaaaccgatatccactcagatacggtcctgtccaagaaagtgacccgcagaaaaagggtcggggatacggacaatggaaggcgcatcaaagaaagcatcaaagatctgggctgtctcgtgacagcatatcgcaaaggcgaaatttcagagagaatttaaggagcagacactatggaaaagacatattatcaggcaccgacagcggcagtattgggagatgtagaactggaagacggagtatctgtctggttttcctcggtggtaaggggagatgagaaccgaatacagatcggaagacagaccaatatccaggaaaactgtacagttcatgtggaggaaggacatccggttatcgtgggcgaacgggtgaccgtgggccacaatacgattctccatggatgcaccatcggggatgagtccatgatcggcatgggaagcatcatcatgaacggagcccagatcgggacccactgttttatcggtgcgggaagcttggtgacggaaggaaccgtgattcctgacggcagtcttgcgttcggccgtccggccaaggttgtgcgtcgggtgaccgatgaagagatccagcatatcaaagagagcagtcagtattatgtggacactgcacaaaatcacctcatagagaaaaagagacataatccaaattaaattttcatattaatttaggaagatgatgtttgggggatgtttatgccggaagattgcgttggtgtagcagtcaatgaggattaccgtgattatatatccggtttcaggaccagtacggaggagctccgtgatttttataaaacagattgtatcacccaggttaactttcagtatgcgattgtttatattgaccggcgggaggcgtccgcgtcaccggtggatgatttttcggggaatgcgatccccaggtgttatggtctgatggatacgcaggtgctggaggaaaccggtgcggcccaggtgaggcgttcaggtcttgacctgaccgggcagggggtcctggcggccgtcatcgacacagggatcgactatacaaactctgtgttccagctgggaaaccggaccacaaagatacagtatctctgggaccagaccatacagggagagaatcctcccatgccctatggatatgggacggaatatacaaaggaacagattgacaatgcgctgcagacggaaaatcctctggagaccgttcctacggaagacacatcaggccatggtacatttcttgcgggaatgattgccgggaatgaagtacaggaggaaaatttttcgggtattgccccaggagcggagttgattgtagtcaaacttaagcaggccaaaagatatttaaaggaatattattgcattgaaccctccagagaagtatatgcggagccggatatcatgctggcgatccgttacgttttggagaaagcagatgagctttccatgcccattgtcatctatctgggccttggtacgaatctctcttcccatacgggcacctctcctttagccagacagatttccacgctggcctaccagccggggatcacggtggtagtatgcggaggaaacgaaggtcaggcaaagcatcactatgcagggaatctgacggacggggaagttgtagttgaggtgaaggtcggtcccaatgagtatggatttaccactgaattatggggatttcagcccaaccagtttttcgtggatattgaatccccatcgggacagagaacagggactatttcggggggttataaaggcagaagggatatcacgtttcttctggaaaataccaatttggctgtggattatttcactatcgatgtatccacgggttcaccgtttatccgaatgcggttcaggcagccggcagaaggaatctggaggttttatgtgacggatgaaaatgtgggtagcagggagtttgatatgtggcttcctatccgcaattttatctctgatgagacctactttctggaatctacgccttataatacactgacggctccgggaaacgcggcacccgtcatcacaccctccacgtataaccagagcaataacagtttttttattgaaagcggaagaggatttccaaggaccatgaccgtacagcctgattttgcagctcccggggtaaatgtcatcggcgttttacccagaggacgcttcggtatgaagacagggtccagcatatcaggtgccgtagtcgcagggattgcggctttgatgttagagtggggatcggtcaagggaaatgacttgatcttaaatacgctgagaatgaaaaattatctgatccggggagccagaagagatccggaccggacttatcccaatagggaatggggattcggagcagtggatatttaccagacttttttaaggatccggtagacattttggaagacatagctgtataaagaatacagccgtgcccttctgttgagagggaaaaaactggagatgaaaaggcatttgaataactatagtttgtcaaaaaataagaatacagaaatcaacctttcggttgatttctttttttgtgccttgatctacaatgatcatatcaaataaaggaggcatatgatgaataccatattaaatatcaatcatttgaaaaaggtgtttcaaaagaaagaagtgataaaaaacttatctttccagcttaatcaaggggaaattctctgcctgctgggaccaaacggcgctgggaaaagtactacaatcaatatattaagcggggttcttgaagatgacggaggaaatgttttgtattatggaagggatatcagaacatgcagtaaggaatttcaaaagcatctgggctttgtaccccaggacctggctttgtatgaagatctcagcgcccaggataatgttcattttttcggctccctgtatggattaaaaaaagaggaattgaaggaaaggacaaaagaatccctggagttcgccggactgtgggaccgcagaaaggataaagttaaaacgttttccggcgggatgaagcggagacttaacattgcctgtgccatcacccaccatccagagattattattatggatgagcccacggtggggatcgatcctcagtccagaaaccatattctcaattctatccgggaactgagagagaagggaatgacagtgctgtatacgacacattatatggaagaagtagaggaaatatcaacaaggatcattatcatggaccacggcaggatcttggcggaggggaccaaagaatccttaaaagaagaattggagacacagaaacggtatcttttgtctgtggagaatctggagaatttttctgccaagggattttataagatcgaaggggtggaagaagtgtcagccaaggaggggatcatagagatcgcaacactgaaaaacgtggagaatctggattttatcattggagaggcagtgcgacagggacttaagatcagccatctttcctgtgaaaatacaagccttgagatggtatttctgaatctgaccggaagaacactgagggattaggagatgaattatgaaagcagtaaaaaatataattacacaggatatttataatctttttacaaatcccatgtggattttttataacatcgttttttcatttctgctgacagcggcccttggatatctgacaaaaggaatgtacggaggcggtgtgacgtcctatgattactatggcattgccatgaccgtgtttgccgtgatgaatacgggaacaatcgcagccaacagctttatggaagaaaggatcaaagcggggaacatgagaatcttattttcaccggtgaataatgcatggatctggatttcaaaaatcattgcatcctttgtgttcggtcttgtctgccatcttgtgaccataggccttttaaagatcagtttccacatctatctgggaagcggggcatggccgtggcttgtatttctgtttataagcgcagagctgtttgcggcagtcttgggagtatttttatgctgtctgtttaaaagcgaacatactgcaaatcagatcctgagccttgttctgcagctgatggctttggccggcggtgtttttgtttcattggagagattcggggaagtctttcggaaacttagttttttatctcctatgaaatggatcatacagtctgtatttttactggtttatgaccagatcccggtctactgcatctatgcgggcattgggctgctgatcctgtcaggtcttggaattctgggatgctttaaaacatggaaaggaggggactgcttatgattccggtatttatgaataatttaaaaagaattctggagaaaaagaagaatgtaatgatctacatgaccctcacgatcatcagtatattggctgcggtatatttggcaggaatgccagagacagcagggaatatcgcgctagtatcaaagagcagtatctccctgccaaagagccagaacattaaagtgacaaaactgaaaaaagttccgccaaaagcagacctggtctcccagcgttttgatgcggtggttgagatatccgcacagggggaaatcaaggtccataccctgagagataagcaatttgagtccaagatctcagatgcggtgggacacggcggaaacatgcaggagacacagataaaaaccaagaagaaagggagcactgtcatgggatttatgatgatgtttcttttgatgcagagtctctattataattccctgttcggcgaggacaaggagaaacatctgatttccagggtgctggtttctgatgtttcccatataagatatttagcaggacatcttttgttttccatcttgtttacctttctgcccgcttttctcaccgtcagtatcctgtggctggccggttttcagatgggatttacactgctccaatatgcatggatgatcggactgctgtcagcatttgcatctgctgcctccctgctgttttatacggtctttcaggaggagaccgccagcatggctggttccgcggtgtttgtgctcacctcagttttggcagggggattttattccttttcaggcacaggcagattgtttaacctggttacagtccttttgccccagaaagcctttttgtcctttctgcacggggtggaacagggaaggatcaccacagtgaatgaggcccagatcttttatgtggcggcagttaccgttgcgtttcttttgatctcagcgggcttgagcagaaggaaggtgtacaggagttaagcagacagttgcaaagggcaggtgttcagggtacaatcagggcagaaataaagttgggaaggggagacagatggagagaccattgatcatgacgaaaatcgggatgccggttccacgggaccattatgtggtaagaacacgtctgttttccaagctggaacagatcagatactcaaaggctgcattgatcgaaggaggcgcaggaacggggaaaacgactctggtctcctcatggtttcagcaatccggttcgggaccggtcttctggatcacgctggatgaagcttttgatcatgtgatcgttttttggaactatgtgatggaagctctgaaggatctgatcggaaatgacatacagatgcagacggttttaaaagaacatattcaggaagaagatatggagcaggttttggcactgcttatcaaccgcctctatgaggctggggagtgtttccttgtgctggataatgctcagtatataaagaatcaaaagcttctggaatcactggatttttttgttgcccatatgccggatagcatgcaccttattctgtccggccggaaaaaaccggatatctacctgggaaccctggcaatggaggcaaaactctttgagattcgtccggaagaattaaagctggatggggcggaggcagcagcctttttaaaaaacaccctgcagctctcctgcaaagaaacaacattgtcagagatgtgcaggcttgcagcggggtgggttggaggcctgcagcttctgtcactttccgttacaaaggacggggaaaatataagaaaacagaaattcagcggaagtattatcgacaaatacatggaaagagaagtactctccagtcttacatctaaagagaccgaattcctcacagtggctggaatccttggatactttgatgaagaagtctgcgggtctttgtttgaggacttctcatttcagcagatgatacaggggctgctcgggaaaaatgttatgctcacaatcttaaatgaagaaaaggagatttactgctgtcatgatattttaaaagaattcttcgggcgcagatttgaaacactgcctgagagtcaaaaggggaagattcttcggaaagcctccgaggtatatttagaaaaaggggattttggcgaatgtctgaagtatgatataaaaagaagagactacacacatgccatgcaggtcatcgcacagatggagttcgccggggaagccatcacatatttaaaacagattcctattgaacgctcagcagaatgtcctgagtttgcctgtcaggctttcttctattattattcaaactttgaggaagaaacgtgtgagaaaatctaccgtctgatcgaggaaaagatgaagtatgaccaggtgtatgaagcgttttcctatattgatctgtttctggccaggtccatccagaagagacataatgagattcttccccttgaggagacattaaaccttcccatgggaaagatgacgatgacgatcaccttgatcaaaaatgcttacctgctgtttattcaggacagagtccgggaagcagaagcatatctgagggaagcggatcagtattatcaggaatcggcaaacctgtatattggttttttcctatacacaacaaaatgccagatgtatgagtatacagggaaactttcgaaggctatggaagcttatgaggcctcccggccgcttatggcaagacttcccaacatgaagccttctttctttgtggggattgccggggtttatataaaacagatggaacttgagaaagcaggagaggctctttgccagacaaaaaaatacatgcaagaaaaatctggaagcatcctgctggcttggaaggtcacaagcttgaggttgcttgttataacggggcagtacgaagaagccagggagatgctggctgatattagaaactattcggcagcaaaactggtccatatgggagaagaactgctgctttattacaaagcgatgcccggggatcttgtatttgaggagttccaaaaagactatgagagtacagacctgaaggaaaccgattacaacagccagattttatatgctttgctgctgtgggagaaagggaaagaaaaagaagcgctggagcttttggaaagaattctggcctacgccagggaaacaggaaataaagctgccatttcccaggcaggacttatgaaagccaggctcctgctccataaagaagataaagaaagcatccggataagagaagctgctatgtcggaagcagtatattattctttttctgaaaatcaccgcctgccgttttggatggtcagggatcagtggggacaacttttacaaaaggcagggcctctgtggaaaaaacagctgtccgcaaaggaacaggactttatccgaagccttggcacagcaggacagaatgagctgctcactctgagagaaagggaagtgctcatggagattaaaaaaggaaagacaaacaaagagatagccagggatctgtgtatctccctggctacggtgaaaagccatttgatccatatctattctaaattaggggccagcaaccgattggatgccgtgaataagatggaagacgatgattatctataatccccgcggcagaattctaaatgataccctatgctgtccatcctgcggccaaggcagcccacgcactcagcggcttcatcgccggtacagatcttgttgtcgtatagggcatagtcttttctgacatcaataggggaaagattcggcatcactacatttgcaccggccagaatccctttttcacgtcctttaggatcaatggttccaagggccgtagtggaaggcagcagaagatgatggttcatcaggcgcagaatgctgatcaaaaaggttgtaagttctgctgtgccggacggctcgtccttaaaaggggtgtcgtgatggggcacaaatggaccaatgcctaccatcttagggtccagttctttaataaacagcaggtcctctgccagatgggccgcagtctgtccgggagcgcccaccatgaagccggtacccacatggaagccagcttcttttagattccacaggcactgtttccggtgagccagggacatttcctttggatgaaggtgctgatagtgttcctctgtggctgtctcatggcgcagaagatagcggtcagcgccggccgcatggagagcctgatagctttccagagagcgttccccaagggacagggtgatggcacagtcaggataagttttgcgcatgagagaaacaatggaaaccatacgttcatcgttaaaatagggatcttctcctccctgaaggacaaagcttcggtatccaagctcatatccgcactggcaggcagagaggatctgctctggtgtcaggcggtaacggctcacatttgcattagaacgttgaatgccgcagtaacagcagtcattcttgcagtagttggtaaactcaatgagccctcgtgggaacactcctgtaccatatatcttctgtgcctctttccgggccagggatgctatatattcggcatcttctttggttctgtgttctatgaggcagataaagtcttctttcgacaaaatctgatcgttatataatcggtcgatcaatgaaaactggttcatacaaatcaggttcctttcttagcatattcgtgagcatatcataccataataaaaatagaagataaaggttttctctccccgtggctttgtgataaaatttgatagaaactacaggagaaaaagaaaggaaatgatcatgaacgagaatgtaactgttttcagccatccgctgatcaagcataagatatcccagctcagggatgaaacatgcaaaacaaaggaattcagagctttagtggaagaaatttctatgcttatgggatatgaggtgctcagggaccttgaaatggaagaaatagagatcaagacacctctggagacgaccatggcgccgatcataaaagggaaaaaactggccttggtcccgatcttaagggcaggacttggcatgaccggcgggatcctgtccctggtaccttccgcaaaggtgggacatgtggggatgtacagggatgaagagacactggagcctaaggaatattactgtaagcttccggaaggcattgaccaaagaatgatccttattgtagatcctatgctggccacaggaggatcagcagatgccgcagtacagttcgtaaagcagaaaggcggaaaacagattaagtttgtttccatcattgcggcgccggagggagtaaagcgtctgtcaaaagcacatccggatatccagatctactgcggagagatcgacagggaactgaatgaaaacggttacattctcccgggacttggagatgccggagaccggattttcggaacaaaatgaaatatgaatggcaaaaatgctttgggaaacaatgagagtaatatttgaatcttatatccgtatgtgctaaactacaaaagttgacgttttttaaaggaaagtgagtaaaagatggtaagagaagatattagaaatattgcgattattgcccatgtcgatcatggaaagaccacattggtggatgaactgttaaaacagagcggtaccttccgcgaaaatcaggcagtggaagaaagagtcatggactctaacgatattgagcgggaacgcggtatcacgattttgtcgaaaaataccggagtccgttataatgatgtaaagatcaacattattgatacaccggggcatgctgatttcggaggcgaagtagagcgtgtgttaaagatggtaaacggtgttgtacttgttgtggatgcctttgagggtcccatgcctcagacaaagtttgtcttgaaaaaagcattggagctggatctgtcagtgatcgtatgtgtcaataaggtagaccggccggaggcaagacctcacgaggtagtggatgaggttctggaattgctgatggagttggatgctgacgataagcagttagattgtccgtttgtgtttgcatccgcaaagggcggatatgcagtcactgatctggataacgaacagaaggatatgaagcctttgtttgatacgatcattgaacacattgaagctccggagggagatccggaaaaaccaacccaggtactgatcagtaccattgactacaatgaatatgtgggaaggatcggtgtcggtaaagtggacaacggttctatcaaggttaaccaggaatatatggtggtcaatgcccatgaggaagaaaagcagcagaaggtccgcatcaccaaattatacgaatttgagggacttaacaaagtggatgtgaaggaggcagggattggttctatcgtggcaatctctggaatctctgatatccacattggggatacgatctgtgacctggaggagcctgtggccatcccatttcagaagatctcagagcctaccattgccatgcagttcatggtcaatgacagcccattggcgggacaggaaggcaagtttgtgacaagcagacatttaagagaccgtctgttccgggaattgaatacggatgtcagcctgagagtggaagagagtgattcaaccgacagctataaggtgtccggacgtggagaactccatttatccgtcctgattgaaaatatgcgccgtgaaggctatgagtttgcagtgagcaaggctgaggtcctatataaagaagacgagaacggcaaaaaactggagcctatggagatcgccgtcgtggacgttccagaagagttctcaggggccgtaatagataagttaagccagagaaaaggggaacttcagggaatgagttcagccaagggcggttattcccggctggaattctctattccgtccagaggtttgatcggctaccggggtgagtttctcaccgatacaaagggcaatggtatcttaaacacagttttcgacggttatggaccttataagggggacatccagtaccgcaagcagggttcattgatcgcctatgaaacaggtgagactgtaacctatggcttatttgcggcccaggaaagaggaaccttgtttgtgggagccggcgagaaggtttacagcggtatggtcatcggccagaacggaaaggctgaggatgtagaagtgaatgtctgcaagaccaagaagctcaccaatacccgtgcctcaggttccgatgattcactgaagctttcaccacctaaaatcttaagcctggaacaggctctggagttcattgacacggacgaactgctggagattacaccggaaaatatcaggatccgaaagaagattttggaccctacaatgaggaaaagacaggcatataagaaaaaataatgtcaaaaccttccgaatattttgtcgaaggatttttcttctaattgctgccaatttggaatactctgtatagtacacgaattgatacaagaagggagaaaaagtatgacagaaaaaggaatcaataataatcaagtggaggtagcgggcgagatcatatccacctttgaatacagccatgagatttttggtgaaggtttttatatggtcaaacttttagtaaacaggttaagcgaagcgactgatgaaataccattgatgatttccgaacgtttagtggatgtgacaaaagactgccggggcaaatatttaagggctttcggacagttccgctcttataacaagcatgaagaaaaccataatcatctgattttatctgtctttgtcagggatctggaatttctggattccatggaagacgtgaagccgaatcagatccagctggacggatttatctgtaaacagccggtttaccggatgacacctctcggacgggagatctgtgacatcctgctggctgtgaaccgttcatatggcaagtccgattatatcccttgtatctgctggggaaggaatgccagatttgcgggcagcctggaaatcggagccaggattgaactggtgggaaggatccagagccgtgaataccagaaaaggatcagtgaatttgaggttgttaagagaacggcctatgaagtttctgtgaacaaacttgaaatgaaggttcttgaagaagagtaatcccgctgaaaatggggcatgaccagtaaaatgccatgaatttgcttcgcacgataagggatagattttttgccggattggtgatataataaagcgatattactaaaggaagattctttgaggtgaaaagatgaaaggacgagtggaagtttactgcggacagggcaaggggaagacatcgtctgccttaggccactgtattaaagcagcaggacaggggaagcaagtcattattgttcaattcctgaaaggaaaagacacggaagaaatcagctttatcagacgcctggaaccagagattcagctgttcagctttgaaaagtatgaccagcactacatggatttgactcctgaacagaaaaaagaacaggagcacttcattggaaacggtctctgttatacaaaaaaggtcatcgacacaagacagtgtgatgtcttagtgttggatgaggtactcggacttttggatctcggacttctcacagagaaggaactggtggcactgatcgccggcagggatgaggaactggaagtcatcatgacagggagaagcctgcccgattccctaaaggactgggcggatgacatctactgtatcagcacaataaaagaatcataaggttacataagagattaggaggaatgtatatggctatttttactggggccggcgttgcgttgattacgccgatgaaagaggacttatcagtagactacgaccagcttgagagggtcattgacgaccagatcaagaatggtacagacagtatcatcatctgcgggaccacaggggaagcgtccacaatgtctcataaagaacagatagaagtggttgccgcatgtgtttcctgtgtcaacaaacgcgttccggtcattgccggtgccggtgctaattgcacagatgaagccctttatcttgccaaggagtcggaaagagtcggaagcgacgggcttttagtagtaactccatattataataaagcgacacaggccggtttagttgaatattacgaaagcattggaaactcagtgaacattccgattcttatgtataatatcccgggaagaaccggtgtgaacattcaggccgatacaacagccaagatttttaaatctgtagaaaatatcgtaggtatgaaagaagccagcggaaacctttcccaggtggcggatgcgctttatctgacagacggggagattgatatgtactctggaaatgatgaccagatacttccaatcttgtctctcggaggaaaaggtgtaatctctgtactgtctaatattgctcctcaggagactcatgatctggtcatgaagttcttaaatggagatgtaaaaggcagtcaggagcttcagatgaagtatatggatgtgatccacaaacttttctgtgaagtgaatcctatccctgttaagagagccatggcagagcttggatacggagccaatgccgtaagaagacctctcacggagatggaagaagaccatgcccaggaactgatcgaagctatgaaaaaagtaggaattctttaaggagcagcacgaatgataaaagtaatgatgcacggctgcaacggagccatgggacaggtgatcagcaagatcatcgatgaatctgacagcgccgtgatggcagccggagtggactttaaggacgatggacacaatccttatcctgtgtttaagaatctggacgactgcaatgtggatgtggatgtcattatcgacttttcatcttccaaagcaacagaccgtctgctgaactatgtgacagagaagcagatcccgcttgtactctgtacaacgggcctcagcgaagaacagattcaaaaggttcaggagacaagtaaaaaaacagcggttttgaggtctgccaatatgtctcttggtgttaatgttttattaaagcttgtaaatacggcggcgaaagtgctggcggaggcagactttgacatcgatatcgtagaaaagcaccataagctcaaggtggatgcgccgtcgggaaccgcacttgctctagcggatgcggtgaatgaagcacttcacaatgaatatgagtacgtctacgaccgaagccagaggaggattcaacgtccgaaaaaggaaatcggcatctcagcagtccgcggaggaaccattgtcggacagcatgatgtaatttttgccgggcaggatgaggttattgaatttcatcacacggcatattccaaggccatttttggaaaaggagcggtcagcgcagcgatctatctggcagggaaaccggcaggtatgtatgacatgagcgacgtgatcggttaaatagaatttgaaaccaaaggcggtacgttaatcttacgtactgcctttttattccatagggaaactatttgactgcgtcgaattgcatttggcgcataaagtgaacatacgaaagaaagagtgggatttatgttatcaaaaaaagtattagaattgtccggccagcattctgtgatccgggatatctttgaattcgggatggaaagagccaaggaagtgggagctgaaaatgtatttgacttcagcattggaaatccttctgttcccgccccgaaagaggtggatgacacagcggtaaagtacatacaagacggagatcctgtggcagtacacggctacaccagcaatgccggcatttatgaggtcagggatgctgttgccaagtctctgaaccgcaggttttcaaccgactacagggcagacaatatctttatgaccatcggagcggctgcggccatcggcatctgttttaaaagtcttgtggacgggcccgaagatgagatcatcacctttgccccgtactttcccgagtatcaggtgtatgcccagggggcaggatgtaagcttacggtgatcccggcagagacagattcctttcagattgattttgaaaggcttgaggcagccatcagtgaacatacaaaagcagtgttgatcaactctcctaacaatccatcgggagcggtctattcagaagagacgattaaacgactggcgaaactcctggagacaaaacagaaagagataggacacagcatttatatcatatcagatgagccttacagggagatcgtgtatgatggtattaagctgccgcacattccttcttattataataatacactggtctgctattccttcagcaaatccctttccattccgggagagaggatcggatatatcatagcgcccagccaggccgaggattttgatgatcttttggcagtttttatcgctgcgggaaggcttctctcctatgtgagcgtccctgccctttatcagaaggttgtgggcgattgtgtagatcttacctctgacttgtctgtctatcaggcaaataaagatctgttttatcacgcgttgattgagatgggttatgagtgtgtggagccgggaggggccttttatctgtttccaaaagccttggaaccggacgccaacgcattttgtgaaagggcaaagaaatacgatcttcttatggttcctggagacagttttggctgtccgggttacgtgaggatctcttactgtgtacccacagaacgtattgagaaagcactgccgctgtttcaacagctgattgatgaatacaaggagagataagatgaagtcttggagagatagtgtaagaaatgtggttccgtatacgccaggggaacagcccaaggaagatggcgtgatcaagcttaacaccaatgaaaacccgtatcccccgtctcctaaggttctggaggcaatgaaagaaattacaaatttaagaaaatatccggatccggcggtatctgacttgacggaagctttgagttcgtattataggattgacagcagtgaagtgtttgtgggagtgggctccgatgatgttttggccattgcctttctgaccttttttaattcggacgttcctgttttcttccctgacattacctattccttttatgatgtctgggcagatctgttccagataccgtttgagagaaaaccgctgaatgagaaatttgagatctgcgctcaggattattacggtgaaaacgggggagtgattttcccgaatcccaatgcccccacaggagcactgctggaacttgagacggtcagggatattttagaccataacagggaagtactggtgatcgtggacgaagcctatattgatttcgggggagaaagcgcattgagcctaatccatgactatgacaaccttcttgtggtgcagacgtactctaaatcccgttcccttgcgggacttagaatcggctatgccatgggaaaccgggaactgatcaaggctatgagtgatgtgaaatactcttttaattcttatacaatgaatgagccgtcaatcgtcatgggcacggcagccattaaagatgaggaatattttcaggatacaagaaacaagatcataaagaccagggaatggtttcaggaagagctgagagagctgggcttttcatttgcggactccaaggcaaattttgtgtttgcggcccatgaatcgataccggccagggagttgtttgaggcggcaaaaaaagaaaaaatttacgtccgttattttgataaaccgagaatcaataattatctaagaatatccattggaacggatgaagaaatgcaggctcttgtaagattctttaaatcaatgatgaataaataggttatggcaggcggccggagaattatttcggtaccgcttgctttttttattctggtgggttaagataatattgtaattatttcaaaattatggaatatacgaggaggggtatggcgtagatttccgtttcacagggaaggagcggttatgttgaacagtcaagaattcttagattatgtagaggagcatatattagagtatgtcagtgatccggaagagaaaaaggccactatacggcagatcacgaagaataataacatcagcttgcatggtctgtgtattggaaaagcaaaagagacctgccagcccattatctatgtagattctttttttacagagtaccaaaacggtgctgatctgggagagcttttgtgcagaatgggcgcactctatgaggagagtgggagcgactgcccgatagaatctgatctgtacagggattacagttatatgaaggggcacctgttctttaggctcgtaaattatgagaagaataaaaaactgctggaggactgtccttatgagcgtgtggaggaccttgcagtcacattccgttggtttgcccaccatgacagggatggaatggccagtgcgctcatacgcagccaggatctcaagctttggggcatcaccagggagcaactcataagagatgcaaaagagaacacggaaaaggccttccctgcgctgctccgccctatggagcagatcttcccgcagatgaagggcggcagggaaaagctgtatgtattatccaatagggaagggatcaacggagcaggggctgtgttgtaccaaggtgtcctggaacgcttttccgagcagatccagggaggattttatatccttcccagcagcattcatgaagtacttttggtgccggaagaggacggaagcgaccctttggctcttgcaaaactggtcaaggaagtaaaccgtactgtggtagaaaaagatgagattttgtctgacagggtttactattacgaaaagggacagaatttatttatgacaaaagtgtgaattttacatcgggaggggcagtgaccttgtcatacgaagccttgtactttataatagatgtacccgtggggcatatcgtattccatagcctttgggtggatacgttctgtgcaacaaactaaaattaaaaatctggggtgatgaaaatgagacgttgggaaatatacttagaaatttttatggaacttcttgtgattgcgggaggggcatttttgctgatctttgttctgccgaagtgcatcggctttttatggccttttgtggctgcctggatcgttgcgatgctggctcatccggttatctcttttctagaagataaggtccggctgcccaaacagtttggctcggcgctgatcatcatcgcggttatagcaggcctgatcgctctaatctcttttatcgtcagccagctggcacagcagatcgttggatttgcagccagtcttccggatctcagggagacagttcagacccagcttatgaatctaaaggagcagatgctccatttgatggagtccctgccgtatggtttcggggacaagtttgataccatgcttggttccacggacaaagtgctggacaaggtggtgggagctattggaaactacggaatggagcattccggcaatgttgccaaaggaatgaccagcggatttattgggacggttgtgatgttctttgctgcgtatctttttattgtggataaggagaagatcatgcagggatatgaaaagcatgttccaaagatggtacgccataagattggaatcttttaccacaatactttgggtgtgctggcaagttactgctgggcccaggtgaagatcatggtcattattattgccatcctatggatcggatttatccttgcaggaatcagctatgctttttttctcgctgttgtgatcgcaatcctggacgtactgccgatccttggtacggggacagccattattccatgggcactctataagattctcaccggggatatcaagacggctgtgatcctattgatcatttatgtgatctgtcttgtgacaaaacaggtgctgcagccgaagatgatgggggacagcatgggaatttctccgctcacgacactgtttttgatttatattggattaaaactttccggaatcggaggcatgcttttggccctgatccttggtatcttcgtgtacaatttgtataagctcggggtgtttgaccggaagattgcatttttccagaggcggattgagatgctgaccatcaacagtgagaaggaagaagagcagataagagaagaacttgagaaagtggaaagagagggtaaggaatgagttatgcagatacattgtttatgaatatgtgcagggacattttagagaatggcaccagcacagagggggagaaggtcaggcctaaatggccggacgggacacctgcctacactttgaagcagtttggtgtggtcaaccgctatgatttatccaaagagtttccggctctgacactgaggaagacgtttgtgaagtctgcggtagatgaactgctttggatctggcagaggaagtctaacaatattcacgacttaaagagccatgtgtgggatgaatgggcagatgaagacggatcgatcggtaaggcgtacggttatcagatgcaggtgaagcatcagtatgcggaaggtatgatggaccaggtggacagggtgatctatgatctgaagcataatccctacagccgcaggattatgacaaatatttatgtgcaccaggatctgcatgagatgaacctttatccgtgtgcctacagtatgacatttaatgtgacgaagaaaccgggacatgacaagctggtgctgaacggtattctcaaccagagatcccaggacatcctggcggcaaacaactggaatgttgttcagtactctgtcctgatctatatgctggctcaggtgtgcgatatggagccgggtgagtttgtccatgtgatcgcagatgcccacatctatgaccggcatatcccgattatcagggaattgatccagcggccggtctatgatgcaccgaagttttccctgaatcctgatgtgaaggatttttatgagtttacactggacgacattaagatagaagattacaaggcgggagaacagatcaaagatattcccatcgccatataggagaagactatgaatctaattgtaaatgcagataagaactgggggatcggaaaagaaaaccagcttctggtccacatcccaaatgatatgaagatgttccggcagacgacaacaggcaaggtggttgtcatgggaagaaagacattggagagtttccccaacggaatgccccttccaaagagaaccaatatcgtcttgaccacagatcaggactatgatggcagaggggcggttgtagtgcacagcacagaagagctgtttgatgaactgaaaaagtacagtgacgaggatatttttatcatcggtggagagagcatctacagaatgatgcttccctactgtgatacagcatacgtgaccagactggactatgcctatgacgcagacacttattttccagatctcgatgagatggaggagtggaagattgtagaggagagcgatgaacagacatatttcgaccttgagtatgtatttttgaagtatcagaagatgaaagattgacagaagatttaaaaagtttcataataaaacgtaagaaaatacatagaacaggaaggaagagataacatgttagatatcaaagttgaaaagacccagtgtccgaaggaaaaaccggccaaagacgatccgctgttgtttggaaccatttttacggatcatatgtttgtgatggattatgaggagggcagaggatggtatgatccgcgcatcgttccttatacagaccttacattgtcaccggcggctacgatctttcattacggacaaggtgtctttgaaggactgaaggcatacaactcagaaagcgggaatgttaatttattccgtccggatatgaatgccaagagatctaaccgctcatccgacagactgtgcattccggagatcccggaagaagattatatccaggccattgagcagctggtcgcattggataaggactggataccggacgaaccggatcattcactgtacatccgtccattcatcatcggaacagatcctttcttaggactgaagacatccagatattataagttcattatcattctgtcaccggtaggaccttattatcctgaaggacttgatccggtcagcatctggatcgaagatgactatgtgcgcgctgtccgcggaggaatcggggaggccaagaccggggggaattatgcagccagcatcctttcccaggtaaaagcccatgatgagggatattctcaagtactctggttggacggtgtagagagaaagtatatcgaagaagtgggagccatgaatatcttctttaagatagatggtaaagttgtgactccgaagttaaatggaagtatccttccaggaatcacaagggattctgtgatccagctctgcaaagagtggggatatgaagtggaagaaaaaaggatctctattgatgagatttacgaagcccacaaggcaggactcctggaggaagtctggggaacagggactgcagcagtaatctcaccggtaggaaagttccgctggggagatgaggtcatgcaggtaaaagacggcggaatcggtgaattaagccacaagctttatgataccgtaagcgggatacagcttggtaagatcaaggacaaccatggctggatcgtggaaatcaaataatatctttttattggctggaagtttgatcttccagcctttttcattgaaaatattgtattcttgaaatgtctttggtataatatgaaaatgtgactataagtcatagactcaaattttatttatgaggaaagtgaaaggagattggacaatggaaatgtacattgcgattgcggccggaatcttatctctggttgttgcatttgcgcttatgtcaaaagtaaaaagtgccaatgcgggaaatgaccagatgcaggaaattgccggagcgatcaacgaaggagcccatgcgttcttaagggcggaatacaagctgcttattgttttttgtattgtagtatttgtattaatcggccttggaattcaaagctgggtatcagcagtctgttttttggttggagcatgcttttctgcgttagcaggatatatcggtatgcatacagctacaaaagcaaatgttagaacagcagaagcagcaagatcaggcgggatgagcaaagctttatccatcgcattttcaggcggagccgttatgggtcttacagtagtaggtctcggactgttcggtgtgaccatggtttataagattacaggagacgtcagcgtactgacaggattcagtctgggagcatcttctgtagcgctgtttggacgtgtgggaggcggtatttatacaaaagctgccgacgtaggagccgatctggtaggtaaagtagaagcaggaatcccggaagatgatccgagaaacccggctgttatcgccgataacgtaggtgataacgtaggtgacgtcgcaggtatgggtgccgatttatacgaatcctatgtaggatctatcgtatctgctatcaccatcggtgtagtggcattcagcgtgaaaggtgccgtatatccattagtgcttgcagcgattggaatcgcggcatcaatcctcggagttatctttgttgtcaacacaaagagccagaatccgcacagggcattggatggaggtacatacttctcaagtgtcatcgttttagttgcagcatttttcttaagccgtcagttctttggtaacctggatactttctgggcaatcctcggcggtgtgctggttggaaatatcatcggtaagcttactgagatctacacatccagcgactacggcgcagttaagaagattgcagaccagtccgagacaggatctgcaacaacgattatttcaggacttgcagtaggaatggaatccacagcattcccgatcatttttatctgtatcgcagttatcgttgcgtatcagtttgcaggtttatatggaattgcccttgcagcagttggtatgctttctacaacaggtatcacagtagcagttgatgcttatggaccgatcgccgacaatgctggaggtattgcggagatggcagagcttgatgaatctgtacgtaagatcacagataagctggatgcagtaggaaatacaacagcagctatgggtaaaggatttgccatcggttctgcagcgctgacagcacttgcactgttttctgcgtattcacaggccgtaagccttacaaccatcaactgtctggatccgaaagttatcgtgggtgtattgatcggaggaatgcttccgttcttattctcagcatttacaatgcagtctgtaggtaagacagcaaatgaaatgattgtggaagtacgccgtcagtttaaagagatcccgggaattcttgaaggaaaaggaaaaccggattacaagaactgtgttgagatttctacatcagcagcattaaaagagatgcttcttccaggagttatggcgatcattgctccattgctcatcggagttctgttgggggtagaggcactcggcggattgttagtaggatctttggcatcaggtgttatgatggcgatcttcatggcaaatgccggaggagcttgggataatgcgaagaagtatattgaagaaggaaatcacggcggaaaaggaagcgatgcccataaggcagcagttgtcggtgacaccgtaggagatccattcaaagatacatcaggaccgtctatcaacatcttgatcaagctgatgacgatcgtagcattagtatttgcaccgttattcttaagcatcggtggaattttataagacttatgaagacaaatataatatccatggaatcgtttgattccatggatatttttttgtttatactagaagctttttgaccctctctaattttctgctgccgttgccttatacgcctgagattttagctttcttttcatcatcagtacggcaatggcagtgacagcggcttctgcggcaataataccggtccaaagagcctgccgtccaaagacagagggcagaagaaagataaacgccacatttacaacaaagcttctcagagaggcaatgaccagagccttggacgttcttttggacgccaggtggtaggtggtaaagatcatattcactgcggcaaacagaaaggatataccatagaccgacaaactctcactggcaaggcgcacaagagccggttccctgttaaatatgtgaatgatcggttttccaaacaatagcagcaccgcatataaggaaagagccagtagaaaatttatcacaataccttttcggaaaaaatactgctctagttccttttttccttctcctacagaacggctgatcaacggctggattccatctgaaactccgataaaaatagagaataccagggtcaggagataacatacgacagaaaaagcggatacgcccatattcccaagatactggatcacgattaaattatagcagaaaattgtgatgggctggctcatctgcgtgatcagttccggtatacccctgcgcaggatctccagaacatagtatttttttaggggcaggagtttcagtttcagccggccttttcccacgataaagtggggaagcatgatcatacaggaaatgacctggccgagcccggatgcaatggcagctccgtgaatccccatgttaaaaacaaagataaacagccagtcaagaaacacattgcttatcgcgccggctgccatgcctactaagccgagccgcggacttccgtcgttacggacaaacgctgcaagcaccatggccatacagaagaagactccgaacaggatatagtaacgaagataatccgaagtcaaggacagcagattcccctttgcacctaggatcatagcaatgctgtctgaaaaaagaaagctgatgatagtcatgacggccgaaaagattagtacaagaaaaatactgttcatgaaagaatgaacggcttttttgtcattgccctgtccgataaagatggatgtaatggttgcacctcccatggcgatcatcatagccactgcagtcaggatacagatgaagggaactgcaagattaatggctcccagtccggaagagccgattccccgccccacaaaaatcccgtcaactacaaagtataaaccggtgaccatggatgcacaaaccgacggaatcacaaattgataaaatttatttttgttcatttagataaaacctccacatttctgttataataaaagtataaagtatcccataatgggagagtcaaggagaagtgagatgaaagaatatctgacaatcggagaagtttctagaatgaaaggagtaggcattaaatccttgagatattatgaccggattggcattctgaaacctgcatatacaaatcccaaaaccgggtaccgttattattccattgagcagatgttgatgctggatatgatcctgctgtgtctgggattggacattccactgaaagaaatgcaggaatatatggatgaggagagccatttagatgtaaaaagcctgctggaggacggccgccgaaaggcggaggagaaggcaaaaaagatacaggagacattgtctcagattgacggtttggaaaagaggatcaaagggtctgatgagataagaaaaaggggcagggatatttatgataaatacattggggagagggcggtcattgcgcttccatgggaacatccggctgcagatgacaaagcatatatgagtgagatcacaaaattgtactctttatcacaggaattgggactgactgtgttttatcagcagggcctgatccgctatagaaaaggcgaaaaggatctctactatatatttatggaaatacagcagtcagatcttaaggatcccaggattttttatctgccggagggcatgtaccaatgcagtgtttcggacgaaacgaggattgaggaaggtaatacggtggatttcgatgaagaaggactcatagttgagactgatttttattttgatcgacagcccaaagacaaatattttttggagttacagatattgaaaggaataggcagcgggaaatagtgttccgctgcctatttgattttatggatttagttccgcgatccggctgaccgctacatagatctcgctgatcttataccaggtaggatagtcaacgattcccgtctgtccaagtccgaatacattctggaatgtccttacggcatcggctgtctgctgtccgaaggaaccgtctaccgggatcgtagggatggaaggataatccttcgcaatccggtttaattgttcctgcatctggcgtaccttgtcacccgtggaaccaatagtcaggtcatggcccggccaggaggcaggaatacctgagatctgctccgcagtattgatataaatactttcaccgtagtagtatctgaggatttcgattggagtgtatccttgatcgccaagatacttagatccccattgtgtcatccttatagtaatagcgtatgtagtacgacgaagcacgcatttatcaggtttatgaataatagtaatagatgtcaacctctccatcagatttcctgtagactatttttttaacaatcgaattgatagctgcatacttctcatcctttgtagttgattcacttgaaacaatatcgtatacgcttccaatccttttaggcatatctgctttcatttcttcttcagggacatttaaacactcaagtttattttgtagagaagatcgttctcttgtaagtatatctttattttccttgtattcatccaaagtgtcaattccattcctgtaggcttctttgattcgaagctccttcatatctattttttctaactgtaactttaagattgagatttcatcagagttcttgttatctgtcaggatctcgaatggaacgtctttttttagcgagtcttcttttaacattgccaatacaataggaacaatctttttttcggatacctgatgggacacagtgcatttccctttaaaatatccataacattgaaagtttgtataaatccttccatatcttttgtcagtgtggacagaggtagaaagactacgcccgcaagcagaacatttaatcaggccggaaagccaatgccgcttgacagatgacggtttgcttttcggggggactatcttagacattaattctattctttcgtttacagcatcccaaagctcttcagaaacggtgggctccaatccgggaactttcactataatccaatcctcttttgatttccttgatccatctggatttctatagttccatctaagccaacctttatagatcggattggttaaaatatacttaattcctcttgcctcaaataattttcctgtttttgtccgatagccaagtgaatttagatatcttgcgatttctaaaaaacccatggaagaattgaattttttaaaagctatctcaacgggttttgattcttctggaactttcttcggaagctcacctttacggacaactttatatccaatagcgggtgatgcttggaaattgccacgcatagcgttttcaaccatgcctcttgtaacatcctcccccaggcgaatagaataaaattcgtccatccactcaatgatccgctcaattagcttgccgaacatcccgtcacccgtctgctccgtgatgcttatcacatcgactttacacttattacgaagtaaatttttgtatacaatactttcttcttgattccttgcgaaacggctgaacttccaaactaaaatcacatcgaagggcgcaggcttttgttttgccatagatatcattttcataaaatcaggtcgcttatcagctttctttcccgatatccccttatccataaaaataaattcattgctaaggatcatgtcattcttctttgcgtattcgatcagaagacgtttctgagcgtcaggagacaattcctcctgcatatgggtactgactcttatgtaagcggcagcagttttcattatatcacctcattctattgtattaaaaaagagtacaaaaataacacctattgccaggtgccttcatgaaatgatataatatgtatgcgactacgatattatatccgacatgaccggtaatagtatcattttatttccgcctggttgacgccgggcggtttttttatttttggttaagtttatctaattcccgttgtgaaattaagtatagtttaatgtcaacgacttcaacgcaatcgaatttagggttatcgctttcaacttcttcgattttctttatataaccttctgctttatgaaatgcgtattcgtttgaaatcatttcagcaacatgagccggaacaacaccgatatccatatctgtcctgtcaggaacaactaaatatgcaggttcgcctttgtattgatattcttctaagtgaattgtatcatcgacagatatgtcagaaatctcatcctgccggagaaaatccccgtctttgtaacaaggaaaagttacaccagctaagtgaaaagttaaatgttttgaaggctttgcagatggcttgaaatccgacgatgcaaaatcctgtcttgatttaacgaacttcggtctatttttcttttgcctcattgtgaaaaagagagtcgagccacaaaaaagtaagagtccaaataaatagattataagccctggaagaaaaccaacttgtttaattatttttgacatattgtagatgatatagccagtccatattacaaaaacaactatagttattttgttaaagctatgttttttcataaaacttctccttattgtagaaatttaactgcgttcatctgagtgtattatcgtggtaaattttaccaaggtataaaaactgacttttatttataatttgttttatggaaataagaacatggcacgcacggcacaataaaaatataactttaaagcaattacaagatctaactggaatcacaaaaaccgcattaaacgaaattgagaatggaaaaaagtcacccacattagatcagttagaaaaaatagcaaaagccttaaatgtacggatcactgacctttttataagcaaatataagtaaattataccataatttcaagctgtagtggcggttcaatgtacgatttccagaataccggaaatcgtatgtatatatgacacaaaagaaagaaattatggtaaaatctttatatcttataaatttcacatatgaaaagggggataagccaatgaatcacatcccatatgtcaaacaaattattgaaaaactacaagaaatggacgaatcagacgaacatttcataaaacagattttagtgcttattaacaggcacttgcagaaaaaggggacgagttaatcgtcttctttttttgtatgttcattttttaagtactcacttattatatgttcttttatatctgcacttgttttacagagcacctctcgtcctgatcggtctaagttcttgtatgatcgcattgtcgcaagtatcaagtcaaagaaatcatttttttcttctaggaacatagagacatattcggcaacttcatcctctggcgggacgaacatttcaccagttccattctctaaataagaaatatttataccaaattctgaacagataagtgcctttgtttgatcggatggattgttttttccggattctaacaaactaacagacgattttgttatatgtattctctttccaaaatcatcttgacttaattcaaagtattgtcttatttcttttattcgttgtccaatttctttaaattcgttactcaatttatcacctccataaatgaatcatatcagaaaaagttagtttagtcaactaaaaagagttgacaaagatgatttaacaaactataatgtaagtgtaatcaacaaggaggtgagaaaaatggacgtaaaaaaaatgacagaggaagaattgagagaaacaacaatgaaaaaccttttacaaatggataagcagagcttgttattaatgaaaagcaatgcagaggtattgtgtatgtaccaagaaatgaaaaaacgggagcaacaaaaagaccagggaaagaaaccagcatagggatgaaaagcaggaaaagaaaagacatctaacacagctacgtaaaccggctgtggaaggacaagtataagaatcgaggtgagaaagtgacaaaagacttaaaagcagcaaatgtaattaatcattacacaaatcttcagaatgccatttatgcagaacttccagaactaatcaatagaatacatgttgaagccctgatgaattgcgaagagggatcacctgtttttttttcggatgatacaaaatttattgaaggattcatagaggatacgaaaagagtctttgaaatatcaatgaagaaaagcggtgaaatgataaaagaaatcttgaatgagacagaagaagaaccccaaaacataaaaaatattttgggggagagtgaaagcgttgacaaaatgagtgaacaaattactcatcaaattcaaggacttctgaaagaacggttttaagaacaactttgttcatttcaagtgatgtcataatggccattacggcaagagagccagaatcaattttaccattttcatctgcatagtttaaaaacatagtttctatagcgtttttgtttgcgtatttctccagggcttttttataggaagaatcaaaaagcaatgaaaaatcgtttttagtcatagagatctcctttcttctgatactcggctctggcgggagcctgtactaaaattataaaggagatacatggaaataacaagcaggaaacaaggacaaacagcggttcataagatgtataaaggaggtgattttgtgctaaaaccaggaaaacgttatgttgaaattaatggaaaagacgttccaatggaagagatcccggaagatgaactggaagaaataaaagaagaatttgtccgaagggtaatcaaatcactgggagggaaggtcacaactgcgtaagcagttgcagaaggacaagcaaggaggagccatgtatataaaaaagcaaatgaaagaagaaatatatgcgatgcatctgaatgggataccaatagaagagatcgcaaagaacaaagatattaaaattggggatgcagaaaaagcaatcatagaatgggaaacaatccttttaaaagaagtagacccacggatcattagaagaacatttttgtattctcttgaagggaactctgtagctaaagctgtttgtgatacagcggaaaaaacaggacaagccagagatattgtagaagaaatcttgggatttcaatatcctttattaacagtacagagtgaaggagacagagactttgttaattgctggaacggaatacatacttattgtcaatgcgtaaagcatgggagagcaagggaggctaggaggtactatgcattgtgcaaaggataggctgaccatgcgtaacggagacacaaatacatatcgggcgtcaaagatttcagagacgtcagaagaaaataattgcctctttggacagcttgtggacaagctgggccaatatgaagacttgggaacggtcgaggaacttagagaattaaaagaaaaaaggcgttagattttgggagaatctaacgccaaggtatttgcatggtaacaaataaatccttaagttcattttaccatgcacatactgaaaatgcaaggagccgagcggcttatatcggccttgtaatttatattaacaactcaacgaaaagtaggtggtgcgtaggtgacaaggaagaagagagggatgacctacatcccatataactatgaggaagcattcaatcaacagatcgagacactccatgaatatttcatagaacagatgctaaagtaccgattcaaagcggtatatgcctgtaaagaagtaagggcaggtgaacagcttgaaatagagatctatccggagttttcaaagctgtcagatataccggaaggggcaagactcaaaagggataactcgaaggcacaaaagagtctgaatgataagaacgcaagaaaatatgtgaatcggctcatagagcataattttacggaccgggatatctggatcactcttacatacgggaaagggcaggagccggacgatatggatgaagcgattaagaatatgcagaactatattagaaggattaattaccagcggaaaaagcgtggcctgccaaatgcaaagtatgtctatgtaacagagttttcgccagaatcaaaagtcaggtggcaccaccatttagtaatggatgggcagctcgatatggacctggtagaaaagacctggaaaaaagggcacagaaatgaaacacgacgtctggaaaaagatgagtatggtctaactggtctggcaaattacataaccaaggagccgaaaggaaaaaagcgatggaacagcagcacaaacctaaagcaatttagagttcggaaagtccattcaaaaaaggatcagttcggaaagtacaaaaaggtggaaggttatgtaaaagaaatggtcaaagaccgatcctatttggaatggcaaatgaaagaatggttcccagagtatctttttacggagtcgcaggtttactataacgattttaacgggatgttttacattcgggccaggatgcggaaaagaagggagattccatgaaacgcatagatatttacatatacacagcctgccatgcaaggaagaccggaccagcagtgtaccgggcaatcttggagtatgtatcaataaaaacaaatcttctgattgatgaaggacaattagaagatacgaccaagaaccgggcagtagtagaagccgcactccgagcattgcacaggatcaagaagggcgaacgaatggaaatcacgatccacacggaatcggaatacttcatgcggatattaaaagatctaaataggtatgcagacgcagattggcagaaagcaaataagcaagacattaaaaacgcagacttgtggaagcaaatctatgtctttgcaacgctgcacaaattaaggtgcgatattaatttagacaaatataactgcaaaacaattttggaagggagacttacatgattaattttgacgtacagaaagaacttggatattacagcgatgaagaggcagcaggaccgattgagatgcaccatattgtttaccggtcacacggaggcgtagaccacttttattcaaaaatagccctcccggccggattccataaaggaaatagggggccacacttgaacaaaaaaacggataaggctttgaaagaggctatgcagaaagaattatttgcggcgttccaagaatttgctacatatgacattaatgcaatcctgaccatcctacaaccagaaaataaacgaagccgtgaaaaaatttgcagacagatggaaaagacaaagaatatcgcaggggagtacaaggcagaggacattgtaaggaccttgatgggagggagattgcattgagagtagcgaagcaaaatggacgctatgcatacacggatgaaatgatgcgaaaatccatgaagctgaaagctggaagtcaaataagcgtttctaaatgggtagggagaggaaaagaggctcatatgcagcggatcgaagggaaattaatagagatctatccgcattatatcctgatagaagttgaaaagaaaaaagggaagtaccgggaatgtttcttaaacaaagatattttctttggaaacgtaaagattcaaaaagccagaagggagaaagcaatttgaaaacgatatcaattataaacctaaagggcggggttgcaaaaacgatctctagtgtaaacataggccatatactggcagcagcccacggattcaaagttttgctgatcgacaatgataagcagggcaatgcaagtaaaatattgaatcggcatgattatagccataaaggaaccgcggacatcatgacggaacgcagaacggaactgaaagaaataatacagcaaacggattatgaagggcttgacattataactgcaaacatgaatcttttgaaagcaaatttagaggttctccttgaccagcagagaccgcaacagacaagattcaaaaaagctttagagcaggctcaaagggagtatgactactgcattatagacaatgccccggatataaatatatccacgattaatgcgctggtggcagcagatgacgtattagtaccggtcacgatagatgactttgctctggacggtttggcagaattaaaagagcagatcgacaatacaaaagaagatctaaacccaaatcttcgtttctgcgggtgttttgtaacacaatacgacaggacaaatgatgctgatatacaggggaaagagttttttaaaaccttggaatatccggtttttgaaacatgcatcagaaaaacgccaaaaatgaagcctagcacgtttgcaagagaaccaattcttttatattcaagcagatgcgcagcatcatacgattacaagtcgctagtagaagaatatctaaaaatgtgaccaatttggtcacgttaaggaggaaaaatgccaaaggaaaactttaacttgatggatctactgaaccaaagatcaaaggagacagtagaaaaaaagagcgagaaagttttggaggacgcagaaaatataatgattgatatttatgatctggccccgtcgaaagaaaacttttacgatacaaagaaagaaattgaagagttgaaacagtctattgaattggtaggcctgctgcaaccactgcttgtgaagaaagaaggagaaaaatacagaatcatatccgggcacaggagaagaattgctatgcttgcacttgtgaaagagggaaaagaacgattccggaaagtgccatgtgtaaagaaagacagtaaaaatgccataatggacaggctggccctgatcatggcaaatagataccgggacaaaacggattgggagaaaatgacggaagttattaaaactgaagaactggttttaaaacttagagaagagtatgaaataaaggggaaaaccagggaattaatttccgagattgtaaaaagtgcaccggctcagatcgggagatataaaacaatatataaaaatctttgttcagatctgatggaagagtttaaaaacgacaacataggtatttcggcagtttatgaggcagcaggtatgtcagaggaatggcaagaaagagtatttgaactgtacaaagaaaatggaactctcagcataaacgatgtaatcacgatgaaggaaaaagaggaagaagcaaaaccaataccaggtcagattgaaatggaagagtttgttgaaaatgaagcacatggcactgaagagaaaggagagcagcgagggttcgaagcaaatccagaaaaaataatatcaaaatgcttctcatgtgcaaactgggagcagtgtagcgaaaaaggggaagctgttgattattgtcttgactttaaaaacaaagatataccaggatccatgtctgagcgagaactgcaagagacacattttatgaacaaacctgagaatcagacggtagatgcgaacggcgagattcgcaatcggagaattgaacatgatgttaaaactgcggctgagttttttgaggacgcaaaagcggggataaaaccatttgaattacgaaaaaacgaccgggattataaagtgggagatttcatgaagatgcgaaagtataaggatggtgaatggagcggagatattatccgaagggaaataacatatgttctggaggatcatgaagggctgaaacctggctactgtattttaggggtgaaagatgtatgaagaatttataccgtggtggagctgcccggagtgcggcagcagggattttgaaattgaggaactagctgtagagatagaatacggattaacagacggctataagtgtaaggaatgtggacatagagaaattgtcccatatccaaacatgtagcatatatcacaaagaaactattaatatcgactaaaggaactaatgcgagtaggcccctcttagtaggggcagaaaggagaacaatgaaattattgaaacggatagatgaaatagaagacagacttgatagtcaaaacaggaacataaatagattatcaaacgaaatcagaagaacgcaaagggagggaagaaaaatggaatgcaagaataaagaaatttttgtaaaaggaatcaaaaaaacaggcacaagaatcggatataaaacaaaaatgttgagagtcatggtaacgaatgatcagacgggaaaaacattgtcggtatcagacggagatacaatatttacattttctgccgatgaaatttcacgctggttagaacgatgatggaactaatattacacactgcgctaatttttgtggccgcttttgaggttacggcaggatttataagtgaatggagaggggacaaaataaagcaatttgaacattttcaaaaagcaatccttcttatattgattgcaaaaatgtagaaaggaaaatcatgatagaaaaagaaaaagggatttatgaattacagataaaaatagaattggataacgatgatttaaagacgcttgaaagatatggagagattagaaataataatgcacatccttcagaagaaaatttaaaaggatattgcgaaatcttattgggcggagcaattgataaactctctgaggaatatgatcaagtggagctagaagagcatgatccgagtattagagagatacgagaaatgcaaagaaatctaagaggagccgcggatgaactgacaaaagtgatagtggcagcaaaagaaggagacgaagaagcaaaagatacagcaattgcaaagtacatgcttaaactaataaaaattggaaaataaattgttcgcattacgaaaggaaggaggaaaagacatggagattgtttcaaacggtgaatgcagggctgaatttactgaggaggagcaggagatccttaagaagtcggaacagattttggacgaggcgcggatcaaagtttttgaggaaggatcaggaacagaggtagaggatgaactgcaatatttcttagaggacacttccaatagtctaaggagaattattgagggaagatattaacggtgaatagaagaagtggactggttccggccagagaaaggggcgaaacgataaaaatgaaaaagacaaaaaaattccggcattgcaacgaagctctccagaatttcattagtttttcacttggcataataatttctattgttttgattattatacgaataatcaaatacgcttagaaaactcacctatattagcattttaggaggtgagggaatgaaattaagaatgaaatgtggaatcgggtacgtaggagcagaatacgtagaagaggttgaaatacaagaatcggaactgaaagggatggatgaaacggaaaaagacagctatatttatgaaaaatatcttcgcccatttgggatggagcatttagagttgtcgtatgaggagatataaaaaattaagatttagggggataggatgctattattaccgataaaaagaaaatggttccagatgattcttactggtgaaaagcgtgaagaatacagagaaatcaaaccatattggacaaagcgtattctcagggagttgggatatccagaagaacactgggaaggtattaaagaatgtttgatagagacgagcacaggccgttcttttctggtacattttaggaatggttatgggaataacgtaccagagtttatagcggaatgccatttatcaattggaaaaggaaaagaagagtggggagcaaaacaaaatgtggaatactttgtgtttcatattgagagaatcacttggtctgcaacaagaggtataatttaaaattttgaggaggtaaaatgataatcttagcacaaagtggtgaagaatatgatgcctatgaatttattcagtctgggaaagtaataaaaataaaatctacagaagacagaagaataaatattattgttggcacctatggtagcagacaaagagcaatagaagtgtttaaagaaatagagcatgccactaagaatgggaaatacaggatgcctaaggattagaatattaaggaggataagcaatgaaaataagaatgaaatgcggaattggatatgaaggcgcagagcacgtagatgaggtggaaataccagactctgaattagagggaaaagatgaattagaaaaagaaaactacatttataaagaataccttcgtccgtttgcagaagaatatctggatatgggatatgaagaaattagaatttagaaaagaagggagatacagatatgaacgaaacgaagatagtagaagttgaccgatgcataaaccttgggtgtatattttgcatcggaagacagtgcattacagatccagaaatagactgcaaaacaaatgagtgtatgagcaccaataatcagaagtatataattccagagtgtgacattgtagaagactgaaaattaggatttaggagggcaatatggaagagtggtatgacgataaatgctgcgccacttgcataaaaggcgaattggtgaaggacaatgacgagggcgaaatggtttattgtaaaccaatagatgattatgtagcgacagattactattgtccaggatataaaaattagtgggtgacggacatccagcggggtgcagaggggttcgattccctgaacgagccggttcaactccggatcgtgcaaggtgcaaaaccccgtatttttagtatttgaggaggaaaagatgattagatgtaatagtcaaaatagatgcggaaaatgcgtggctgaaatggacgggcaagagagcaaaggtggcacgattgtatgtgatattgcagaagatctagagttttgtatagatgatattttagcaatctgtgaatttgcaacagatgaataaaattagaatttaggaggaaggacatgaacattgtatcatttggtggaggaacgaatagtactgcaatgattattggtatgtatagaaggaaaattcctattgacctgatcttgttttcagataca

SEQ ID NO: 21 - DNA, 65867 bp, Anaerostipes rhamnosivorans
agtctatatagaaccatattatcaacgtataatctcacatctccctgaaatctaagtagaatcattaaaaagtagcccaagataattcctaaaacgtcgaaaaaataaattatgagattttgcttctgagattgtttaatattcatatttctacaccctctatttcatcgaaatgtataccttttttatcttctttatctattttaacagtcagggttataaaaatcacatgtattgtttaagaaaattaacagtgttcattttcatcggatcttcaaatcttttaatgagcatgtgcttgtcttttttagttcgtttttgactgtctcgttatagccttttaaactgtttctgaaatttgtttggttttaaatctttgtttatgtaccgtcacaataattatattttccgacatatcatttgatatttaagaaaaaactgtctaattcttgattttaggaatcccatagccacattgtccctattataattaataccccatgcctaccaaaatttcttatttgtcgtaatatagtccacttttttattaataaaatcccaaactttttcctcattatcaacagtccacaagtttaccagcactttggaatttaaaaactgatttaatgttgagtctgaaattttagtgtaattgcaatccagggcaattcctcttttataatagtaattaatcatgcctggatttgcatcattggtaacatgctgtagcttgacatttggcatatcctttactatttttctcatctcaaccatggtgtcaaagtcataagcaataaacatatattgtccgccgtccatttttgtctccacagtatcacttaatttctgtaaatcatcttccacaactccctgcatcctgctgtctgcaactttgccgttcgtcgtatactccatcttgatctcaataaccggtaccatatctttctctttacacaccttcagatagtcttctaagaaggctacttgattagcttttggatcattcttgtattttgaaatattgttaccgctgattatctttctactttttatatcctctgacgtcatatcttcaggccttttatcaacaccacacatccttttcaaagttgtatcatgcatggcaacaaattcgccatcacttgtcatacggatatctgtctccgcaccccagaatcctgcctctcctgcaagctcaaatgctttcactgtattttccggagcctctgaacttaacccgcggtgtgccacaaatttggtcccgctgcttggattacttgtaattttaccaatcacccttaccggatagcttgatttcttcttagatccgtctgccgctgtcgccgtaatagttgcagtcccctgtccttttgcatagatcttccctgaagaattaaccgtcgccacctttgtgttggatgacttatatgtaactttcttattgtaagcatatgatggtgaaactgtaggttttctggtatagtactttccctgctggagaacagctttgcttgaactgaacgataccttggataccttcttcgtttttaccgtaaccttacatcttacctttttagacttctgtgattttaccctggctgtgatgtaggccgtcccgttcttcttcgcagttacagttcctttagaactgaccgtcgccaccttcttattactggaataccactgaagctttctgcttttggctttggacggagttatttttactgtaaactttttggatgtgcccctgtacatggtctttttggaagaaacattggaaaatttaatcttttttaccttaggggttttggctgacacagtatttgtgcccatcaaaataaacgccatacacaatgatgccgttcgcaataaaaattttagctttttcatactacacctcattctttctctctcagctaaacactaaacctctgtccccatcctagacttatctctttgattccctattttatcacaaaagtaacatttctacaacatatttgccctattccagttctccgattaaaacaaaattcaacattccgcattattttggtaactatattttcactttctttattttctcgttaccgcttcggtctaccacatatatcgtataatatctgccccttttcgcctgaaagctggcactgcctttcttattcttcagcctgcttccctttttcccttgcttaaaataagaaaccgatttctttccttttgcatatctgaattttaatgtctttttgctctcgtctgaggcttttatcctaacttttgcttttgaacggctctttttatatactttgacattaagcttcggcggcttcccggcagtgatctttacggtcttcactgtctggttccctgcgctgtctctagcataaaccgtataatacccggccttttttactttgagtgtcccgttttttacgttatatcccctttttccattggaaaagtaagcggaagtcttctttcccgttatgtatttaactgcagtaactctcgtactgcctctctttttggcactgacctttgccagagaataattcttcttctgtgttgttttaactgtaatatatggtggatagtaattagaattcacagtcttttcagcattcaaatatccgccggacgccacttttccatttaagctgctgattctggttgctccgcgcttcaacgcatttttcgccatagcaggggttattccttggtactttgcgtagattaaagctgctgtaccggtcaccataggcgctgccatagaggttccggtctcaacgatgccccgttcattaacacccaggctgaatatgtccgtccccggcgctgccagcagaacacttttctttccatagtttgagtaagactctaagtaacctgtgtaatcaagatttgcaaccgatatcacgttgctgtaattatagctggccggataagcaggatatctgtcattgttgtttctctcatttcccgcagcgcagataaacagcatatctttactatcttttatcacatccctgagcatcttatcgttctggtaggatccaaagctaaaattacatatcttggcccccatctttttggcatattttatacccttgatgacactcaaggttgttccttctccttttctcccgcccagaaccttgatggtcataagctttacattggtgcccgatgcaatccccgctattccatagccattgttgcgcacagcggcgatagtccccgccccatgggtcccatggtcatcctcataattattgtagctataagccctgtttgaatagactttgttattgttattataaaaattccagccataaatatcatctttgtagccgtttttatcactgtctttcccgtttttcttttctttcgtattcttccacataacggacttaaggtcagtactagtgtagtctactccggtatcaatattggccacaatgaccttactcgtattttttttattcagctgtttccaaaggttctttacattaatatccaatccctttttctgtggaatcgtaacaccctgtcccccgccctgagttcggacaaagtctgtaagatttgttccatagttatagagcccccactgtacataaaagaaaggatcgttaacaccagccgttttcatggcggtctctctctcggatactctgccgtttccgtctaccagccgataaacataattgggctgtacatattctacatcatcatttttatccagttctttcactgcagctgccgtctctttttttgtgtccgccttgaccacagctaccgtccccgttatctgctcggcttctcccggtgtttcctctatgatattttctttttttgtctcggatacaccgtctttgaattttacaatgacctcttttgtcttatattcgtttggatccgtcactgatgtcgcggtgctctcagattcatcggcccggactggctttgtccctggctgaacgaacataaggccccctgcaaggcagactgctgtcaatgtacttatagctcttctcatactcttttcctcttctttctggatactacaatataaattatcaagatgatccctgcagacgtactgacagcaactcccgggatcagccacggagttgtgtaatttaacgtgattttgtgttcacccggcgtaaggactaaccccatatacataccgttagtttttaatattttggtctccctgccgtcgactttcgctgaccatcccttagaatatgccaccggaatacacaacaatttggttttcttagtcttgatctgccctgaaaacacattgtctttataagtaatattctgaagtgaattcttcttcctgtttttcagctctttctgcatcttttcaggatttactgagatcagagagatagactctacactgtatgttccagagcttaaaaaattcacttcaaagtccccttccccggtaattttcatcagataatcatggcgtccaaaatagtaggaactcattttatcctgcatataaatatgctgttcctttgagccgtctatgacatcgatccctctgttgccttttttcccttttaaggcgatatctgagatgttggatttgttttttgtcaaagggctgtaccggagattcttaatatagatgtaattctcctttttggaattcagattgacacgatactttttggtctttcctccctcattgaccgacaggctttgtctgccagaaagtcgtttctctccaacatgtatagaagaacgttcctgcttcttaaggccttctacaccctcatccagaactgccgatttgatcatcgcctgctcacgttctgccccgttcatggaatcgtactccttttggctcatccatgaatcatacgtatacccaaacggaagggcatatgggttttcatagagcctgaccccatctgtctcatagagcagacggcagtccttcaggttctcattttcaggtaccataatatatttgactgaggcaaggcttaaaagcccctgtctcagatccacaccgtgatacttgtcagcatactgcattcccagcgtttcgtagctgcgtactgcctccattgtctccttggggataatactatagtaagcgctgactgtattcaattcgtccagaacaccataattgtggaacctctgagtttcattgtggactctgaccatctggcctgcagcctgctctttcagctgtttattttcatcagaagaaagcagtctcatggcttctccatggtttaaaaactcacttatataatttctccctccgtcaccaaaacggtaaaatccatggaccccgatgctgaccacaatcagcactgagataacaattctggtggctatattcttactatccatacttttccactggaaaaacagtaacaccagataaaacaaaaagagaaaaataccggctatataggctccatcatttttaaacacatccggcttgctaaactcagccactctgatgatcaggttataaatagagataccgatcaatatccctatgatctggcgcttggacatatggaaaagtctcggatacatctctgccacaagcagtgcaatgatgaacgtaaagacaaagctccaacggtttgtaacgtaggaaaaaccgttaaagataaatccgaacactggaagtgccaggaatatgatacagcccaaaaaggccagtttgtattttttatgtttcattcggcgggaatacatcaagaacagaacaacgatgcctgctataggaataaaacctacattggtcgactgtccgctgtttccatatcccacaaaattctccaggaataaaatataatacttgaacggataggcgattagattgtggacctgtccgcctccacgtccgtttcctaaaaagccatagacagcaggcagaagaatcactgctgaaagagccactcccagaatataatatcctgcgaattccctgagcagcacgagaaagtttttaagcctgtcctcggcatagtattgataaaaccggatcagcgcatagatgactgtaaaaatcgtcagcatatataagaaataaaagttactcatcgatgctaccgcagtaactgcgataaacaggtaaggacgttcttttttatagatcttttcaacgcctaggcacagcaatggaaaataaatcatcggattaataaaaaatggatgcctgagtcctgaacggaaaataaaaccgcagaacacatacacaagagcccccatcacagaggcaaaattatttttgttcatctttctgcaatataacataaaagctgttcccgctaaaaacatccgcagaaggatcataaaattatacataacttccgtatgtttcatcggcacgaagatatacagaagattcagcggatcaccgatggcataataatttaacgtggataaaatatcccctccgtagccaagattcatattccacataggaagtgacgaatgccctgagaaaatgcttttcactgcttcccgcagataatgaccccaataagccagagactcaaaatgctgagtcagtccgtcttccacgcctgcggcccagataaacgattttccttctgcgataaacggataaaaagccgcaaaacacattacaataaataatatgaaatatagcaaataatatttctttgtactcctttgtgatgtcatatctctgtcgctccttttagaatcttcttcgtttcctcaaaaccaaaagcaggccaagggtaagtatactgacagccgcaccgggtacaagtcccggcgtccggtaagtcatctggatcttatgttctcccggtgtcagcagccagcccatatacatgccatttacttttttgatcttcaaatcccttccgttatcctgggccttccatccgctggaataggggatggggatgcaaagcatcctgttttccttcacagaaatttttcctgagaagtcattatccttatatgaaatctccttcatgacactattgtctttcagacgaatcagctgatgcagagttttgtcctggctgacagccaaaatcttcaagttatctactttatatttcccgcgtttattaaaaataatactgagagtcttgtccttcagccttccaagatgcagtatatagtcttttcttccaaaagaataattgcttcctttctgctggatcctgagtttctgtctccagccctggcctgacaatgttataaaatatgtattttttccttctctgttgttctcatattccaatccctttatatagagataattatcctttcccggtaccatatgaattggaagctggtacatctgatgcccttttttaatctttatagattttttctctaatgagatatttcgctctgtgattgaaaactgcggatctcctctgcggatgccctgctccttttcgtccagcacagcactctgaagcattgcctgctctctctcaatcccgttcagctccttgtattcatccgctgtaatataagagtcataggaatatccaaatggaagagcatatctgttttttaagagcaacctgccgttttttatagatattggatcaaagcctttctttttccatgcttttgacgcatttttgctatattttacagaaatatatttgactccattcagaccatacagaccagtcctgtggtccagtcccttgaacttaaatagatacgtcagatttaatgtctggaagctttctactgtcttccctacatttccatttgtaacactgtaatagttatttactgtatttaaatcagcagcctgtccgtagttatgattcaggctctgattggtgttcacacggaaaacgccgggatctcctgtattttgtaatacttttgctgagtcatccagcagggattcatatcctgttccgctgtctaagaagtctttggtgtactttcctttcttaggaccaaaccgataataggagtgtattcccagactgccgatgatcagcaaagctatcatcacagaactgatcacactttgatatgccgctcctgtcttctggatcagacagatacataaaaaactgcccgccaatgctatgatagcactgttagaaccatatgtatagaacccgcctccaacaaatttctgagcaaacacactatagacagccaacagaccaatcccagcggcgaccagccatttttctctcttcgtcattgaaaacagcttcggatacatttctacaaaaataaatgcgacaataaatcctatgacaaatgtccagcggtttgtcacatatgcaaaaccattcaacccataaccaaacactttgacacagaggaagatcagtgccaatccaaatacagctttgagaggtgtatattttctgtctttattctttgccgcaaacaggagaagaacggctaatcctgccacaggaacaaaacttaaagaaaccgaatttcctgaatttccaaaaccaacgaaattcagcaggacacggctgtaataccgcagtggatagaacattcccactgatatgttctcgttgctccgtccgtttcctaggaaccctatgactgccggcagcaaaataactgcggaaagccccagtcccaaaagataatagccggagaatcttcccactgtccgtataaaagtcataaaataattctcccggacataggaaaaaaagcggatcaaagcatacaaaaatgtaaatatagtgagcatataaagaaaataatagttgctcatagccgaaatacttacagagagtataaacacataaggtttctcatttttaaatatcttttcagcgccaatcaaaagaagcggtaaatagatcagcgggttcaggaaaaatggatgccttatgcccgcccacagtgtaaatcctgtaaacacatagatcagagaaccaaatacagttgccctgtgccctttcttcatatacaaacaataggccataaaggacagccctgccagatacattctgaaaataatcataaaattatacagatactctgcattttctttagaaacaaatgcatatacaagattcagcgggtcccctatggcgtaatagtttaatgtagataatatatctgcgccgtatccaagactcatatcccacatagggagcgaaggatgtcctgcaaaaagattcgaaaaaaagctccgcagatactcgccccagtaagccaatgaatttagatgctggcttaatccgtcacctgccattgaaacccatatcagagacttcccgctctgatacatagggtaaaacacaatgcaggatatgaccgcaaacaatgccgtatagatcaatccactttttaattttttattctctctcatgattcataccacctatccaaaaaattccataaaactaaagtattcatttattataccataagtcggcaataatttaagctctttctagtcacttctctggattgtaagaaaatcttcacattcttgcaaacttttatcagaggttttatactataataaattttaaacatataatatataagaaaaggatactatcatgatgaatttaattaaaaaactttggtataatcaagggctccgctatctttttttcggcggttgcactactcttgtaaacctggtgatatttaatgtacttgtttatacgttccatatcaattataccatcagtaatattatttctgtcattgcggcaattctctttgcctatgtggtcaataagctttttgtcttctcttccagctgcagctcctggaaagaagtatttttagaattttacaggtttgtgctgggccgtttatctactatggtcattgaagtcggcggcgtctatgtccttgtacagtttattggacaggccaaatggctggccaaactggaaacacaggtgatcgtggtgatcgtaaactactttatcagtaaatttttagtttttaaacatacacagccagaaagagattaacattatgaaattagataaagcacaaaagataatgcttgcactgactctggtctttgccctgtgtctgggagtcatcggctcttcatttcccgtcaaggaagatgccacaccccagtaccttgacaccttagatcttagaggtatcgacaacattatgatcgtggcacatcctgacgatgagtctctatggggaggagcgcacctggcaaaggaccggtaccttgttgtatgtctcaccaatgccaatacatatcatctcaccagatacaaagaatttaaatacgctatgaatgtagccggttctcccagcatcatgctgaattatccggactatgtaaacagaaaacgggtttcatggaaaccatacaaaaacaggattgaaaaaaacatccgcacccttttaagatacaaaaaatggaaggtcatcgccacccataatccggaaggagaatatggccaccctcatcatatcggcacttcaaacattgtcacattcgccgcgaagaaagaacatgattttgatcacttatactatttcggtaagtattactgccagctgcctccggagaggcccatcggtcccccggaagacccgaaatatatgaagatcaaaaaaaagatgttctcattctacaaccgggaacgccgtacaatctggaaacacagacagatgcactactttgaaaattgggtaaaggcttcagactggaacgaaggaacaaaaagcaaaacagcggaaggaaatcggccttgatttctttccgctgttttttatttcttctgttttgtgatctccgaaataatgtatctcggcctcattttaacttcctcatatattttagacagataatatccgatcactcctaaactgaacatcaagatactgccaatgatcagcaagagcaggatcactgtggtgaagcctgccactgcctttccgctgaaatataggtagagtgactgtaccgccaaaacaactgcaaataaaaagaagatgacgccacagaatgtaacaacctgcataggtactgcactgaaagacgtaatattattgatcgcatatctgaaaagtgacttcatagaccattttgattctccggcttccctctcttgtacgtggaattctacataagtagtcttaaagcccacccaggaggacagtgcacggaaaaatacattccgttctggcagcttaagaaattcgtccacagcagtccggtccagaagtttaaagtccgatgctcttgacatatccacacctgtggcattgctgataatcttataaaatgtcttggcaaaaaacttgtggatcatcccttcttttcctctggatgcctttactccctcgatcacctgataaccctgctcccagagcctgtacatagtcaccagagtctcaggaggatgctggagatcgcagtccatgactgccacacaatctccagaggcattggcgatccctgcaaacacagctccttcttttccaaaattcctggaaaagcagactccttttatgtttggattctcctcagatactttaacaatcttttcccatgtcaggtccttagacccgtcattgacaaacaccagttcataacttatgttttcttcttccataagctctggtatgatcctggccgtcttttctatcatttgttcttcattgtaagccggaagaacgattgacattgtcttcataaataggctcctattctgatactgtaatcttcacctggacatttccgataatatccatattctttacttctttgagctgtacctgcaccgtgtgtgttccggtctcatagacagacacatcaatctttggattcaaatccttagctgtcagttcatccacaactgattttaatcctgtaaccttgatcggcacttcagattggtcaaactctatatgatagttattcttattgttgatcagctgaatctggtccgtagaaagagtgatcgtgcgctttttattcttctcaatatttgccttgactacaatatcctcgatcttgcttgtatcctttacaaacgtaattccctccggaagcttgatatcttctgctttgatggttttttcgatactcttggtactgctgctgatatcaatggtggacaaagcgatctcgtccacctcatccagaacgtccttttctccggtgatctcgatctcttccggagagtagtcgatacttcccagagcatatccctttgcaggagttccttttgtctttactacgatcggtacagtcttggtcctgctaaacttgatccttactttgacttcgtcgtcatccagtttcagcctggactggtctacctgctctccttcgctgtcatagcagacaactttatgagtgatggatacgtctctctttagtccagaaacatctacaattactttgatggctttcacctgcttaaccacactcttaggaccggaaatagaaatcaggttcggtgccgcagtcctgctgcccaccgcatatcccgatgccggttttcctgttgtctccactgtcaccggcacctgtactctgcgcaggtcttccagttttactttgacactctggttatttcctgatacaatctccagctggtcagcaaacttcagcggtacgatcttgatcgggatggaatttaccttagacatggaggacacatctgcagttgccctgaaatcactttttttcaatttgtcaagaactgtctttttcccttttaccgtaaagctcacggttgagccctctgtgatcttatacgtccggttcagctcatccagtacctgctcattgagcatatccacagggatatttgaaaaagacttggttatcaccggatcttctgtgttgatgacaaacagccaaagcaggatggcaaggacaagagaaaatatttttaagacaagatcatttcctaatttttctttcattgcggttcaatcctttccaaagcctgaatttccttccgtcgctataatcgttcttcaccacagccagccggtctctcagctgctgcggagtcaatcctctgtaaattctgccgccctgtgcaatggaaatacctcccgtttcttctgagacaacaatcgtcacactgtcagagacttcactgatccccactgccgccctgtgcctggttcccagttccttttcaatctccaggctgtcgctcagaggcagatagcaggtagctgacacaatgcggttatttctcacgatcactgccccatcgtgaagcggagtattgtgttcaaaaatattgatcagcagctgactgctcatcttggcgtcaacaggaattcctgtccgctcaaattcacccagagggacttcacgttccatcacgatcagtgcaccggtcttgaccttcgacatctcaatggtagccctaacgatctcctggagagtccggtctgtatatcccaccttctcatcccggctttcgtcggatgaaaacagatttacaataggattcttcctgcccagctgctccagggcattcctgagttccggctgaaacacaatgatcgccgcagtgacacccacacccatggtattattgatcagccaggatattgtgtgcagctgacatacataagctaccatagctacaaaaacaagcagcataatgcctttcagaagggtccaggctctggtattcttgatccatttggcgatttcatagatcagcacgctgacgatcaggatatccaggatatccgtgattgacatctggggaatggataaccaatataaatatttttcgatgactgataaaagctgctccaaatctactctcccttatgttttttaaatccaaatttcttcccggcaggattgatcttcgtgatattgatctcttcctcattgaccctgctcttgggaatcgccttgacataatagtaataatcctcatcctcaaactccaaggtctcttgtctggagtagtcaatgacgatcttgaaaaactgcatgatcatcacaaccagaatgcttaccgccgcaatgatcagctctccgccgatatctacacggtttccagtaaaaaatccgccaaccagcacgatggtcacataggcaatacctccgataaagatcgaaaaataccatccataatccacctgcatcctgcggatccccacaatcagggctaccacaaaaataaaacacagaatatatataattaactgcttattctctatcgttccctgaagtacaaaattatacaactggctgccaaatgaaccgttatttacctgtaccactccgctctggactgtctgtgcaaagatgtacagaaatgttcccatgacaatcgccggaattcccgtgatcccaatgaagctgcccacaaacagtggaatgacggcagtcaagtggaaaaagaaaaacaccggggtcataaaaaataaatatctcatttcaggaaacatccgctgatacagcagatagtaaatacccacgataataaaatacaatattgtgatctccatcgataccacagataaatgaatgataatgatcagattgcacagcaaatatgtcatcgaaaatggcaggaatacgcagatacccgccaggatcaatgtgctgaacggctgacttagtattttagaatatccaaacagtgaattgatcacataaaatatgaacacccctcctatgaactttcccagaggtccgcagacctgccaatgggatgacaggaattttaatagcttttctctataaatcaataatttttccatctgccaactcctctgtatctatcttcgggcttttatcttcgttctcttcttcctcataaacttccagaagcttctccaactgtctttcatatgcattgatgcgcaccatagcctcattatagcgatgctccgctctggaccgggtggtctttacatagcaaaagaaaaggattccaaaacagaataaaatcaatattgccggtacagcgatggtccctttccgcatcatagaaattacgttttctatctgaaatatgattatgatcccgctgagaagcaagagcgccaccactagagcaactcctactttcattgtttccattcttacataatcactgcagctataacggttgatccttaaatccttgacgccctcttttttttcgtactgggcgagcgaagtcataatctttatttttttttctgaaatcataggattcacccctcctttttagctgcaccgccggacatggtgacattatatcacaaaatgaggtacagaccaaggcgtctgtacctcattgtttactcttttattttctttctcatccgtgtgtactctgtgagagatgccggcccctccagcacttcccgctccactcttaagattctgtctcctccggaacggacagaccatttcaccagagagatctcattatcttcgatctcaatacatgtgatacaccgcggatgcacacagctcccggaattaaaatagaatccttcctccggtgtggagaatgcgggccggtgtgtatgcccggcgatcaagatctgctgcctgttgcagctgtagtcagccagccttttctcaactcgttctttggcttttctagggcgtccggcaccggttggatccaaaaatcctatcagctccatatgacgccacacataccgcactaaaaaccgggccagcggccatagtgtatcattcagaaaatctccctggaaaccgtgtaccataaatatttcatttccatctttcctgttttggaagaccaaaccttcttccacagtaattccgggaagaagaggctgttcagtatgggcggaattacaataataattgtcgcagtggcggttcatataccccttattccgtttgactatgtcatggtttccatacaccatataaagccgtttttgttcgtaaaatctggacaagatccagaagatgtcatcgtgaacctccgcaatggtcttcagtctcctattttcccacagttcatcaccgtctccaagttcaatatacgtaaatccttcatggaaataatactccagagcgccaaaacacacatcctgattggccagaaaattatctcctgcgttcccctgtcctcggtgacagtcgctcatgatcaccagttttgaatcggaatcaaacgttacaaccggtgcatgtttataaacctgatccagttttctctttacggtcctataactcattcttctttctgccctttgcaatcatcacaggagtctgtattctggcaacggcagtcatgcggcttgcattcccgtttcggaggagaagggtaacagagatgacatacgggcccctgcggacatgaagggtcttgagaacacggcggctctggcggacgcggtggcttcggcggtcttggatccggtctcttacctatcagccagtctttgatccattcaaatgccccatagagaccttttgtatatagggagtccacaaatatcgcgtagagctccggcatgatggcttttatatattccaccttatcaagtgtgtcactatacttttcagtagagaattcatataatctacagttatttctgtttgttttctgaacaacagcttcctgcagtccatcccttgcttccggctgcactgaatgaggtgtcgtataatggatacgcaccgtgttcctgcgtacagaaaattccctttttctatatccaagattccttaaactgtctataaatacatctctcatttcccggttaggaaatgttatggatgcatccataacaagtgaatccggttctgaaaattcccccagcttgaagccagtcagccaccagtggacatccttacggcgcagaataacttttccatttctctttagaacatatgacattggcagtctttcatcatcccgtatattttcataaaaagttccttgaaacttttcatgatcgatgtcttctctctccgtattatatataccaatctcccctccggtagtgattccgtactgacctttccacagttctatcagccatctttttcccccataagagaaagtgataggctcacaatccataatcatattaaacaagggcgcaccctcatcataaagacgacaatatccaacttcccgctgccaacagtccatcagagaatagaagtaatcaccatttatttcatatgcaaacccagcttctttgaggtcggcatttaattccatttgttgttgccgtttattcgcattcggacgaaacctgcggcttctgatccgccatacgatgacaacagccagcacagctattatgacaacagctgcaataattataataggcgtcgctaacacaataatccttcctttatttatcttagtaatacattttattccacgtctccttctttcgttacatttggcacgtgtatgatactctttttttagacttactatttcatccacgcaaatgtcactataaacaacaaaagaagaccacttctcagtagtctccctttcttttcattatctcttatatttattgtatgaacaatcgtctagttctgttgattacagctgcctctatttatccaggctcttcatcgtcgggaataacaatacatccctgatcgcagatgagtctgtcagcaacatgaccattcggtctattccaaaaccaatgcctcctgtcggcggcataccaatctctaatgcattcaggaaatcttcgtctgtggaatttgcttcttcgtcaccctgggcgagcagttcttcctgtgccttaaaccgttctctctgatcgatgggatcattaagctcggagtaggcatttgccatctcccatccgttcatgaaaaactcaaaccgttccacatagtccggattttccggcttcttcttcgtaagaggagaaatctcaaccggatgatccaatacaaatgtaggctgtaccagattgtcctccacgaactcctcgaagaacagattaaggatatcgccttttttatggcgttcttcatattctacgtgatgttcatccgcagcttttcttgcctcttcaaccgtatggatctcgtcaaagtcaacacccgcatatttctttacagcctcaaccattgtgatcttttcaaacggtttgcccaaatccatctcaatgccattgtatgtgatcgtggtgcttcccacgacttcctgtgccagatagcggtacagattctctgtcagttccatcattccattgtaatctgtatacgcctggtataattccatcagagtaaattccggattatgtcttgtatctacaccctcatttcggaatacacggccaatctcatacaccttttccaggccgccgacgatcagtctctttaaataaagttccagggagatgcggagttttacatcttcatccaatgcattatagtgggtctcaaacggtctggccgccgctcctccggcattcggcaccagcatcggtgtttctacttccataaatccctgtccgtctaagaaggaacggatcttgctgatgatcttagagcgtttaataaacgtgtctttggattcctcattcatgatcagatccacatacctctggcggtatctggcgtcggtatcctttaagccatggaatttctccggaaggggcttcaggctttttgataagagtacaacctcttttgcgtgaatggacttttcgccggttttggtcgcaaatacagtacctttgattccgatgatatctccaatatccatctttttaaagtccttgtattcctccacaccgatttcgtctctggccacatatgcctgaatccgtccctcaagatcctgtatattacagaaagaagcctttcccatgaccctcttgaacatcatccggcctgcaacagacacttcttttccttccagttcttcaaaatggtctttgatctccatagagtgatgcgttgtatcatacttcatgatctcaaacggatttcttcctgcactctgtaattcttccagtttatttctgcgtaccttgacaagttcgcccgcatctttgttctgttctgccactttccaatcctcttactttctcttaacgtctaaaactttatatttattcacctggcctacgccttccacttccaccacatctccgatcttcgccccgagcagtgccttgccaatcggtgcttcattggaaatcttgttattcagaatatcagcctctgtggaaccgacgatatgataagtaacttcttcatcaaatgtgatgtcttctaactttacaaggcagccaaggctgatgacaccgtgctgaaattcctcatcgatcacctccgcatttttcaggatctgttctaattcttcgatccttgcctcaatgtccctctgctcatctttcgcagcatcgtactcggcattctctgataagtctccctgctctctcgcttctttgatcttctgggctacttcttttcttttgacaacttttaaatcctgtaattcatcctctaatgtctttaagccctcctgagtcagaatattcttttttgcttctgccatattttcgcttcctttccttctatatcaatccttctgtccgtctggttcgtacacgctcatccgtaaattatatctcagcggtaatttgtttgtcaactaaggatgttctctttctttagtttttctcttttacaatgtagatcggcctgtttttcgtctccaggtatgcttttgataagtacaatcctacaataccagtacatagaagctgtactccacccaaagatgttataatacacaccagagagggccagcccgctactggatcaccaaccaataatgccctaataataatcacgagcaaaaggataaacgacaaaaagcaaatcaccattccaatgacggatacgattgacagaggtgtcgttgaaaaagcaataattccttctaaagcataacgaaatagtttccagaatgaccatttggtttctccgactacccgttcaacattttcatactcaagccattttgttttaaatccgacccatccaaaaataccttttgaaaaccggttgtattccttcattgatagaatagcatccaccatagaccgcttcataaatcgaaaatctctggcaccatcaacaatatccgcatctgacatcttattaataatctgataaaacttcctcgcaaaaaatgaccggatcttaggctccccttttcttgttactcgcctggtagcaacgctgtcgtactcgccttgctgaatcaccttatacatttccggaatcaatgacggaggatcctgtagatccacatccatcgtcactgcataatctccgcctgcattctgaagccctgcgtaaagtgctgcttcctttccaaagtttcttgaaaaagaaatatacctgactccagaatccttttgagcaagttctttcaatatcttaagtgtcccgtcacagcttccgtcatccacaaacagcaattcaaaatccagttcagggactttctgcatgaccttctgcatttcttcataataatagggtatagcctcttcttcattaaaacacggcactatacatgtacatacttccataccaagccctcctatccttcgtttttgtatccgctcagaagttcagccagcttcccgatactttccgcatgatttacctgatctctcagctttgctgctccggcaagtccatgcgtataccacgacacatgttttctcatctcccgaatcccaatgtattctcccttacagtcgatcatcatcctggcatgcctaagaaccatctggatgatctcttccatgtccggcctgtcaaggagttcccctgtctcaaaataatgactgagttccttaaaaatccaggggtttcctttggcgcctctggcaatcatcaggccgtcacatccagtttcatccagcatcctctccgcatccagcggtgaattgatatccccgtttcctatgactggaatagaaactgcctctttgacctgccttataatgtcccaatctgctttcccggaataatactgctcccttgtcctgccgtgcacagccaccgctgccgctccgctttgttctgcgatctttgccatttccaccgcattgatgtgctggtcatcaaaacctttccggatctttacggtaaccggaacgtgaagcttatctgacatggcccggataatccgtccggcaagctcaggatttttcattaaagctgacccgtctccattgttgacgatctttgggaccggacagcccatgttgatgtcaatgatgtcaaaacccatatcctcgatcctgacagccatgtctgccatcagttcgggatcggaaccaaaaatctgggctgcaatgggcctttctttttcctcttttgcaagaagaggacctgtgttggggctgttgtagtacattcccttggcactgaccatctccgtacagagaagcccagcccccatctccttacataagagccggtaaggaagatccgtgacccctgccataggtgccagcacaaagggatgttctattttaatatccccaatggccaatggctttaatctactgctgcttttcataaataatccgcaatcccttcaatgtcagtgtatcatcaaaacagttaatctccggaacctccctggagatcatttttcccagaccgccagtggccacaactttcatgtcctcaaatccagtttccttcttcatctgctcaatgatatattttgtctctccgatgaccccgtacataagtcctgcctgcatgctcgtaatcgtattagtggccaggatactctccggcgtctttatctctatttcaggaagtctggccgctcccttccagagagcgttggcagaagtgcggatccccggcgctgtcacaccggctaaaaatactccgtcctccgtaaccacatcataggtggttgcagtgccgtaatcaatcaccaaagttggtcctccatagatctcataggctgccaccaaatccacgatccggtctgcacccacttccctcggattcagccgtccaaggttgatcccggtcttgatacctggacccacgatcacaggtgtcacatcaaaatatttgatgatcccgttggtcagagagtacatgatattcggcaccactgacccgataatagccgcacggattccttttgtgttcagtcccttggctgctatcatatcccgaattaaaattccaaattcatcagaagtccttggcagcttcgtcgtaatacgaaacatttccaccagatccttatccacaaaaatgccagctgtgatattggtatttcccacatccatagtcaataacattgcttatacctcttctcccagaaaaaacacccgaaaaaataactccagcgattcccaaagatccgctctgtcacgctgcatttcttttatcttcagtgcacttccgatttcatcataaaaaaaatcattgtccgcggctgttgtcttaaataacaattttccgttttcgtcaaactccagtgtcaaaattcccccgatctcttctgtatacaacacacaggcaatctttagttcatccttgatctgctggggaacagattcaaaatcctcattgagataatatttcttctcatatccgttagagccgcatagggtaatcgtttcctgatacatacttcctcctgtcatacactgtagccatggattcctctgatggatacctccccggagaaaatctcctgcgtccgtccaagggaatctaccactctgagctcaccccggcggttgatcccttcggaccggcagatatactcgtcctttccccgcacaactttgatctcctggccgaagtgggcgagaaatccattgtattcctccatcagttcagaaaaatcttccgtttttttaaatagctcatagtcctgctcaaaatgcttcaaaacttgacatagcagtctagtacggtccactgtttctcccgtctctgcaagcagggaagtggccttgtccctgacctcctccgggaactgtccaatatttgcattgatcccaatgcctaccacaatatagttcagttcatccatctgagcgctcagctccgtgaggatcccgcagacctttttgccattgaccaatacatcattgggccatttgatgcgtccgtcaatacccgccgcatctttgatccccttttctacagccaacgctgccacaagagtcagcatagaactgttttcaagctcaatatccggcctcagcacaaagctcatccacacaccctgacccggtacggatatccatgaccgtcctcttcttcccttcccggaggtctgctcttctgccgttacaagcgtcccatgtaaggcccctgcttccgcaagccttttcgcctccagattggtggaatccacagtcttcataacctttaccgttcttcccagccaggtagtcgaaagactgcttttgatatcttcagcggtaagtacgtccggacatcggaccagcttatagcccttgttgctgacagaatcaatcacatatccttcttccttcaaagctttgatatgtttccagaccgcggttcttgaaactccgaatttttggcacagctcctggccggatatataactttcgcctgcctttaattccctgagaatcttttctttcattgtcttagtcttctccaagggttgcgaccatgactgcttttatagtatgcatgcggttttccgcttcatcgaagattacttccgcatatttttcaaaaacatcttctgtgacttcattgcctttgactgccggcaggcagtgcataacgatacttgtgtcttttcctgtttttttcatcagttcgtcgttgacctggaaaggtttcaacaacgccactctctccgccgccttgtcttcctctcccatagagcaccatacatctgtatagatacagtccgctccttttacggcatcggtatcttctgtaaaagtaagtgctgctccggattcctctgcgtactctctgcattggtcgatcaactcttcctttggccagaggctttttggagcaagacaggtgaagttaacacccatttttgcgcagccgatcatcagggaattgcccatattgttgcgtccgtcccctgcaaaaacgaagttcagtccctttaattctccgaactgctctctcagtgtaagaaaatcagccaggatctgtgtcggatgatagtcatccgtcagaccgttccataccggcacaccgctgtattttgccagcttttccacgttctcatgtaagaatccacggaattcaatgccgtcaaacattcttccaaggactctggccgtatcttccacgctttccttatatcccagctggatgtcatcctttcctaagtactcaggatgtccgccctcatcaatacagccgatggtaaatgcacaccttgtccttgtacttggcttttcaaaaataagagcgatatttttgccttttaagctgtctcctgtgatgccttttttcttatcagcttttaacttcgccgcaagatccagcagaccgctgatctcttccggggtaaaatcttttagtgtcaaaaaatttcttccttttaaattcatctttcttcctccgttttatgggctttgcataacaatcattatatagcacccaatatgttttcacaagccttactgatggcttctcccagcttttggtgcccttctgcgcttagatggcatgcgtcttttcgggacggctgcgcatactgtgccgcatccaaaaaatgaaccccataaagtttcgcccactctttatatacagaagccagccgtctagaatattcacaggctctctcatatcccatcgtctctccgtcagggacactgcgtatattctctcccactaaaataggtgagaccagaagaatatctgccgatctgttgtcctctctcttctgcggcgttacttccaggatctttttcatcagacgctcaatggcctttccgatatccacaggggtcagctggaaacggatctttaagtcgttggtccccagcatcagaaccactaaatctacaggcccatgggagtggagacacggttccaaatatgcgtatccattcctgccgggacggatctcgtcctcaaagcaggtggttctcccgttaagtccttctggaatcactctggcacgtccctccatatttttttcaagaatacttgtccatctcttttcatacggatagcggtatccgttatccggattgtagccatatgtattggaatccccataacacagtatcgtcttcatcgtacactccttttcgtgacactatataaaaacagccacttcttatccatatataagaagcggttgtttcatatttctttataatacctgattcaggaaattaattgttctttgttcttttggatttgacaaaagctcatggggttccccctgttcaacgatatatcccgcatccataaaaatgatccggtccgcaacctcgcgtgcaaatcccatctcatgtgttactacaaccatggtcattccattcttcgccagctgcttcataacgtttaaaacttctccgaccatctccggatccagcgcgctggtcggctcatcgaacaacatgatatccggatgcatagccaaagctctggcgatcgccacacgctgtttctgtcctccggaaagctgtgccggatagacactggctttttcctcaagtcccacatctctcagcaggtccatgcctactgtcttggcttcctccaatgtcattttctttaactggaccggtgccatggtgatattttctaagaccgttttatgaggaaacagattaaaatgctggaataccataccaatattctctctcactttgttaatatctgttcctttgtccgtgatatcaaagccgtccacgacaacttcaccgcctgtaatcgtctccaagcggttgagacatcttaaaaatgtactctttccggaaccggaaggcccaatcaggcagaccacttctccgtctgcaacctccagatccattccctttaaaacctctaagtctccgaagctcttaaccagaccttttacctgaacctttacttttttcgtatctttattttccataagacaacttcctttccactatatttgccaccttagaaaggatggtgcagatcaccagataataaatggcagccatcacataaatactcatgacggatgtaggctcattggccgtgatgatctggctgttcatcgtaagttcccggataccgatggcatacaccagagaggtatccttaatagaaatgatgaactggttaatgatagaaggaagcattgtcctgatcgcctgcggaagaatgacctttgacatggcctttccgtagggcagtccgaggcttcttgctgcctccatctgacccttgtccacagactcgatccctccgcggacgatctcagccatatatgcgccggcatttaaactgagggctacaacagcagccacaaaagggccgccaaaatcatcccagtttaaatccatcggctgcagaaaagctcctgccactccatagtacatgatgaaaacctgtacgaccaaaggagtcccgcggataatatccacataaattttgcagatgatgttaagtattttgttttttgatacgctgaacataccaaaaataataccgatgatgctggcacagatcagggaagcaagagcaagctgcagtgtcagtcccagcgccgtcgagaacgacggaaaatactgttggaatagttctataaagttcataatctgtccgcctacttagtcttagtatatttatcaacgatttcctgatattttccgttgtctttgatcttctttaaaccgctgttaaacttctctacaagctcagaatttttgcccttctttacagcaaatccatactggcttccgctctcagatgtgaaagcaacctgtaatttcagattcttctgtccgatctggtaagaaattaccggaaaatcttcaaagcatgccgctgcgtttccagttaatactgcctggtacatggttggtgaatccttaaactgtcttaccttgtagccatatttatcagcattggcattggcatatgtggcacctaccgtacctacttttgctgccactgtctttcctttcaggctggaaagagcttctttttctgcttttttcttgtctttaatattatcaaatgtctttccgcctttttttacagcgaaagcaactttggaatcatagtaagcttcagaaaaatcgtatttctgctttctttccttggttatagacataccggcgatcattccgtcgctctgtccggactctacagaagccatggcagcatcaaaaccaaccgctgtcactttgtacttaaatccttcttctttagcaatcgcatctaataaatcaaggtcgatccctacacggttaccatccttatcctcgaactcaaatggtgtaaatgttgtgtcagatgcaatcttatatgtcttttccttggagtctttcttatttccgccgccgcatgcaaccaagctgatccccatgacagctgcgagacctactgctaaaacctttttcaatctcattcctttttcctcctaaatgataatattcgtgccttttcgttttgaaaaagtacacactaatggatattatatcttattttgaagaattggtcaaactctcttcaatttcgtcccttagagaaggtttttcgtccgcggccacctccgtgatggatttcaccagtcctgcgattccctggatctcagatgggacaatgatcttcgtagcttttccgtctgccgcctttgcaaatgcttccaagctctttaactggagtaccgcattatctggagaagctttctttaaaaattcaataccatctgcattagctttctgaatctgtttgattgcttccgcctgtccctcagactccctgatggtcgcttctttgttcgcctctgcacggaggatcgctgattctttgtcaccctctgcttccaggatcacagattccttatggccttctgcgcggaggatggcggatttcttttcaccttccgcacgaaggatcgcttctctcctctccctctctgccttcatctgtttttccatggcatcctggattgctgacggcggaataatgttctttaattccactcggttgactttgatcccccatgggtctgttgcttcatctaaagtagcacgcatctttgtattaatggtttccctggatgtcaatgtctggtcaagttccaagtcaccgatgatatttctcaatgttgtagctgtcagattttcgatggccatgatcggattctcaactccatatgaataaagttttggatctgtaatctgaaaatagacgactgtatcaatctgcatggtgacattgtctttcgtgataaccggctgaggtggaaaatccacaacctgttccttcaagtttactcttcttgccactcggtcaatgaacggaactttgatatgaagccctacagaccacgtttctttgaatgctcccagacgttccaccacataggcatttgcctgcggaacgatccggatgctggaaagcatcgccatgatgataatgaaaaataagatcaataataaaataaacattctgcacctcctacttcttgctcacgattagtttcacacctttaatttcctctacgattacctctgtctcttccgggatttcctcatcatcggcagaacgcgccgtccaatccataccctggatgtagaccattccctggcctttaatattgatgattctttttttaacaatacctgtcttcccaatcaggctctctgcattggtcttttctgtcttgctgttgagatatttttgggcccacggcctcgcaaatacaaaaacgatacaagaaacagccgcagccaatatcagctgcccgaagaatggaagccccagcccagcgccaatggctgctgccaaagaacccaccgcaaaccaaatgctcgtaagtcccagcgtcaatatttccaacaagaggaaaacagcgaccgctatcaaccagtataccgtatacataatcagctacctccttttctctgccttctggcctcatacataagtagtcctccggccatagctgcatttaatgattcgacccggccttccatcgggatcctgatccgcttatctgccaaagccgcgattctgtctgtcagcccattcccctcattccctatgaggaacgcactgattttatcataggattcttccgtgtaatctgtaccatccagatgcgccgcgtaaacatgaatgaaacgctgctttaacagttccaccatctctgccagatcctccacataacaaaacggcacccggaagatggaacccatagtagagcgtatgacttttgggttgtagatatccaccgtatctttgctcatgatgacacagcagactcctgctccttctccggtcctgatcaatgtccccagattccccggatcctgtaggttctccagcaaaagaatgctgttgccgtccctttttattatttcagaaatcggggtctgctccattctcaccagggaaagaatcccctggggtgtctctgtatcagagatctcacggaacacttgggaagagacctcctcgaaagaaacatcccggagtatctctccatgctcctgtaaaaaatcactggaaacaaatactttttctctccggtcctccggtatctcccgaaacatgcggagtccctcaataacaaacagtccggtcttttttctctctctggaacttttcagtaattttaccacctgtttgatctgtttattctgtgatgttgtaatcataagtttttctccactatctaaagccggtacaggaaaaccccagtccggacatcacttccatttatctaagcttgatcaaatcttctttatttccaatcacaatcaggctgtcgcgctcatttaatatctggtctggatccggcgccccgttaaaatcttctccactgtggatggccacaacattgatgttatatttcccacggatatccagctggcgcagatttttcccaacccagccttttttcagatgtatctccacgatactggtcttggatgacaggtcaaacaggtccatcacttttccactcacaagattgtaggcagtcctggcacccatttcctcctcaggatataccacctcatcggcgccgatcctttttagaatctctcctttcagccttccatctgccttagcaaggatatacggaactccgatctcctttgcgatcatcagtgccataacactggcttccagactttccgcagtggcaatgaccaccccgtccatctcctccaaaccgatgctgttcatcacttccatatcggtgacatccgcgcagactgcgcaggtgacataatccacaatatccctgaccaattcttccttctggtccactgccagcacttctgccccatctttcatcagatttaaggcaacacttttgccaaatttgccaagcccaagcactgcatatgattttcccattttccttactcctttataataacattgtataatacacattccacaaaaggcagtctgcacagcagattctatcttcttttatcctaaaataatatcttcttccggatatgctgccaatactttctttttaccccgtactgcaaatcccactgccaaagagacaggaccgacccttcccagatacatggtgacgatgatcgccagccttccgatcacactcaagtccggtgtcaatcccttgctaagacccacggttccaagtgcggagacacattcataacatgtatccataaaggatgcggtgtcagataccagtacgatcaaaatagaagacaacagtacaatcagattgacacagatgatcgtcagtgcttttggtataacatgcattggtatggttctcttaaatatatggatcgctccctcctgcttgaccgtaacgagcacacagtaaaccaaaacaacaaatgtgaccgtcttaactccgcctgctgttcccacaggagagcctccgatgaacataagaatcatagagatcagagaggatccctcggtcagcgccgcctggggaacagtctcaaatcccgccgttcttactgtgacagactgaaacatcgatgccataagcttattgccaagagaaaggtttcctattgttttagtatttgcatattcaaagataaaaataaatacggtaccgataaaaattaaaatcactgtggtggacaatacgatcttagagtgaagtctcagctttccaaaagctctgcgaagcgggaattccctatggatcagtgccctgaatacccgaagcagatccctccaaacgatgaaaccaagccctcctaagataatcagtcccatgacagtaaaatttaccacagggttcgtaatatagctcctaagactgtccatttgcacgatatcgatccctgcattgcagaaagcggatatagaattaaatacagatgcccaaatgccatattttacaccgaattccggaataaactgtgttgcaaataatgccgccccgatcccttctataataaaagtcccttttaaaatcttgcggaccagttctatgagaccggacattgtattcaagctgtaggattcctggatcagtatccggtttttcattgtcagctttttcttcagaaacagaaacattcctgtggtaaatgtaataacacccagacctcccagctgtatcagcaccaggatcactaactgtccgaatgtactccagtaagtcatcgttgtctccaccaccagcccggtgacacatacagatgttgtggatgtaaacaatgcgtcaatataaggcgtggcgtggccgctctttgacgcgatcggcaatgtcagcagcacagacccaatcagtatgacaaataagaatccaaataatataatatggaccggcttaatcttcttcattcccttttatttctccttatatacagaaaaagccatctttaaaagatcgctttttccataaaatctttttattttccaagtaaatgggcaatctgtaattgatagtcatccacatgcttttccattgccagcccctcgtccatatcaatgtccatgaactttccgttctgatatccaacgatacggttgctctttcctgcacataaaagatccactgcataggctcccatcatagaagcatacaccctgtcttttgctgtagggcttccgccacgctgcatgtggcctaaaatcgtagctcttgtctcaattcctgtagctgcctcgatcctcttggccatgccataagaatgtccaaccccttccgcattgatgatcatgtgatgagtctttcctaacgctctgttcctgagcagatgttcgatgatctgctgctctaacttcggcatgttgccgtcaaagctttccggaatcagaatatcttccgctccagtagccattccgcaccacagtgcgatataaccagcgccacgtcccattacctcaacgatactgcagcgctcgtgggatgtggatgtatctctgatcttatcaatggcttccatcgccgtgttcactgctgtatcaaatccgatagtatactcggtacatgcgatgtcaaggtcgatggtccctggaattccgatggtgttgatcccaagctccgcaagtctctgcgctccctggaaagaaccgtctccaccgatgacaacaagtccgtcgattccctgttcgcggcacacctctgcgcctcttttctgtccttccggtgtcttgaactcatcacagcgggcagtaaataagatggtgcctccccgtgaaatactatctgcagtatgtcttgaagtcagatcgatgatatcttcattcaataaaccattatatccttttctgataccctttacatttaaaccgcgctctaaacctactctaacgactgctcttgtggcagcgttcattgcgggtgcatcccctccgctggtcagtactccaattgttcttactttcggtgttcccatgttaaaatcctccaaataatagcataaaattatattttgttagactcattttaatgcatttgttaaagattttcaatataattattttaaccctgttttcttgatcctgatatttccttttccataacgttctccaagtgcataaatgagttcatcctcactgttcaccgcataagcccggtccagtctgttcacggctctttccttacggcagtagacgatcacaggattgctgcccctgtaaggcttcagcatctcataaaaccgttcctgttccgcaaaaaaacggtccttgtcatcaaactgcacccaaatctcctgggccaggtcgtcaaacgtactgatctggctgcagatcatcttactctcttcctctgagatagaggtgtttccttttacaaagatcttggcatcctctttgagaagatgctggtagttgttaaattctctcggaaatacaatgacttccactgtccccataagatcttccaccgtcaaaaacgccatattctggttgtttctggtgagttttatattcatgtcactgatgatgcctccgatgatacaggtctgcttatcctttaacactggctgccccgtgtcttcttccgcaacaaaatcggatgtactggctgtcgtgagcctctccaggatctcaacatcgtcttccagcggatgtccgcttacatagatacccagcacctctttttcgattgccagtctctgttctttgtcatactccccaacgtctgggtactttatctcaaagctctcctgctggtcctccgacataaaatctaaaaggctcatttgtccggagatctcctgtttgcgttccttctggacgctctccagaatatttgcgtagacgaacatctgctgttttcttgtccgcccaagtccgtccagtgctcctgacttgatcagactctccacggtccgtttgttcatttccttgctggacagccgttccaccagatctttcaggctcctgaaaggcccatgttcggttctctcttttagaatctcttctatgaccggctttccaagactcttgatggcactgagcccgtagcggatacatccgtcatccacggaaaacgctccttcacccttattgatatccggcggcagtatcctgattcccatctttcggcaggcatagatatattctgataccttattagtgtttcccaaaacggaggtcagcaatgcagccataaattctttttgatagtagcatttcagataagcagtttggtaagaaaccaccgcataggctgccgcatgggatttattaaaggcatactttgcaaagtccagcatctcatcccagatatgatttgccagtttctcgtcgataccatttttgatacagccaggaatctcttcctcttcattgccgtatacaaagttcttccgctccttcaccatgacgtcgcccttttttttggacatggctctgcggacaaggtcactgcggccgagggtatatccggccagctccattacgatctgcattacctgttcctgatatacgatacatccatatgtgggctttaaaatcttctccagctgcggacagtcatagcggatgctctctttatccacttttccctttacgtacctcgggataaagtccatcggtcccggccggtaaagagagatccccgcgatgatctcctccaggctttccggcttcagttccttcatgaaggatttcatgccgccgctttccagctggaacacaccctctgttttaccctggccgatcatctcatagacttttgcgtcttccgtatcgatatcattaatgttaaacggcctgccctctttcttcccaatcaggtgcaccgcatcctggatcactgtcaatgtccggagtcccaggaaatccatcttgagcagtcccaattcttcgatggtcgtcatagtaaactgtgttgttatagcatcgtctgtaccttttgccaaaggcacaaactcatcgatggaatccttaccaatcacgacacctgcggcatgcatagatgcgtgcctcggcagtccttccagacgcttcgacatgtcgataagatattttgtttcttcatcttccgcatatgcctttttcagatcagggctttttttcaacgccccctcaatggtgatattcagctcattgggcaccatttttgcaatgctgtccaccttggcgtaaggaatatccagaactcttcccacgtcccggatgaccgctctggccgccatagttccgaacgttatgatctgaaccaccttgtcttttccatacttctccaccacatagtcaatgacttcctgcctgcgctcataacagaaatcaatatcaatatccggcatggatacacgctccggattcaggaagcgctcaaacagaagctggtatttggtaggttcgatatctgtgatctccagacagtaggatacaatacttcccgccgcagatccccgcccgggccccacagcgataccatggtctttagcatagcggataaaatcccatacgatcaggaaatagtccacatatcccatattttcaatcgtgtccagctcaaattccaggcggtctctgagttcctccgacacatcttcgtaacggcggctgatcccctcatcacaaagctttcttaaataagaagtagaagtataaccctccggcacatcaaacttcggcaccttctgttccccgaaaatgatctccacattgcaccgctttgcaatctttcccgtattgtctatggcttctctggcatatggaaaaaggcgctccatctcctcaggtgattttaagtaatactgtccgccctcataccgcatcctgtcctcatccgccactttttttccggtctggatacacagcaggatatcatggggctccacatcctccgcaaaggtatagtggagatcattggtggccaccagctcaatgcctgtctccttggacatcttaagcagggcagagttgactgttgtctgctcactgatcccatgatcctggagttccagaaagaaattgcccttgccgaagatcttctccagcctcagggcagctttttttgccttctcatagtcgccttctctgatataagttgggatctctcctcccagacaggcactcagcgcaatgatgccttcactgtaagtctccagcacttcataatctactctcggcttatagtaaaatccttctgtaaatcctctggatacaatcttcatcaagttgtgatacccctggtcattttcagccaaaaggaccagatggaaataattgttacttccctgccttccgtccttttcaaatctggatccagccgtcacatagatctcacatccaatgataggcttgatgccttctgctttggcagccttatagaaatcaatgactccatacatggcaccgtgatctgtgatggcaatactgtccatccccagttctttggtctgatgaacaagctccttgatcttactggatccatccagcagactgtattctgtatgaacatgtaagtgtgtaaaactcatggactttctctcctgtacttattcttcgcccggtctctgaggctcatcgtaaatattatgtccggtctctaatactttcccctccaccgtaaacttcattgcatttgtaccaagattctcacatatggtctttgtcactgcctgaactgtcagcacctcacctgaactgcccatcttgcgcaaagtcttttcaattgttttattaaagtcgatataggctgtctgcttcttgatctggaaagagttgatcttcgtcccctcttccagtgttcccatcttaatcatctctttcagcagcttctgcgccgtcacatcctggatctttacctttccctggatcaatgtctccacattgtcatccggcgcatagatggtacaatcttttacaaccggcttctttgattctgccgttgtggctgcggcttttttccctgttgtctttttctttgccgtggtcttttccgcttcagtggaagcttttgtggtcttttctgttgtctgctttgtattatcattactgcatccggctaatcccgctgctgcgaccacagccagtagtccggcaaatatcagttttttctttctcataacgtgtcctccttcggttgatcgaacaacaattctatacagatatatagattttaccacaaaactatttcctgtgctataatgctaaggaaaagataagaagataaaggagtaagattatggaacatatgaccattcaggatattttagctgcaaccggcggcacccttctgtgcggcgattcttctatgccgatcaaacgcataagcacagactccagaacagtggggccggataccttgtttgtacccatcatcggtgaacgggtaaacgcacataaatttatcgacagcgccctgaaagacggcggagctgctctgactcaggaacatgaccacgcagaaggtccgcatccatttatcagggtagcggatactttaaaggctatgcagcagatcgcatcttattatagaaataaaatgtctcttccgatcattggcattacaggaagtgttggaaaaaccacgacccgcgagatgatcgcccatgtgctgaagggcaaatatcgtgtgtttgagaccattggaaaccagaacagccaggtcggcgtacccttgaccctggaccgtctcacatcaaaggatgagatcggagtgctggagatgggtatgagcgaacccggtcagatcaccatccttggagaaatcatccatcccaacgccgcggtggtcaccaatgtgggagtctcacacatagaacagatgggcagccgggacaatatctgcagggaaaagctggacatacaaaacggcctgccaaaagacggcgtgctgtatctgaacggtgacaacgatatgatccggaaacatattgattatgtaacacatccatatgagttttttggatttgcgaaagactgcacttaccgggcagttgatgtgaccgaagataatgggcagacacatttcacatttgtctgcggagatcgaaaagaacctatcatattaaatgtccttggagaccacaacgtatccaatgcccttgctgctatcgccatcggacttgcctacgatgtgccgatgacagtgatcaggcagcagctttctaccttttcaggacagcggcagaacattgttaagcagaatggttataccatcatcgatgacgcctacaatgccagccctgattctatgaaggccggtcttaaaatattatctgactatcaggataccggaagaaaaattgccgtcctgtccgatatgctggaactggggccggattcccccggataccataaggaagtaggggaataccttggttcaacaaaagtcacggacctttatattaccggtacactctccaaggaatatgtcaaagcgtccctgaagaaaaatccttccctaagggttcagtggtttgccaccaacaaagaactgatttcttttctgaaggaaaatttgaaggaacatgatgtggtccttgtaaaaggctccaatgggatgaaactatatgaaataacaaaagctttggaagaataaagtgggcaagcccatctcatctccccaccccttcactctttgaggggcttgacaactttgagcactaaatgcgatttgacgtagtcaaatagattccttacacatttgtgtgcatactgccctcagggcttttttattccatagggaggttcaaagaactttcctatggaataaaaaatgaaaggccttccacctggcgatggaaggcctttcattataccaaaatacacttaatgtgtgagagagggttatctctaattcaagggagggaaccttgaatttagatttattatacatcatatttcggatttttgggcgtcaatgtaataaatggcggtttagttgtcataaaaacttttttgtgccctgatttttcctatttttgtaccgcttatctttttattcttccgtttattttccttccatttttcgcccttattacgttaattttgacatttttcactccatatgctacttttaattagcaaaacggagcccgttcctgcggtgtaagcataggtacactccgttttttcatttttaaactatataaaggagattttatatgaaaaaccaaacgtattcttcccctcaagacctggaaggaaagattccccttccccaggctgtcgtattaggccttcagcacgtactggccatgtttgcaggtaatctgactccaatcattttgattgccggtgcctgcggcatcggtgcgggcagtccccttcaggtttccatcctgcaaaacgccatgctggtggccggtctggtgacctttgttcagctttttaccatcggacctgtgggagcccgtcttccggtcgtcatgggaaccagctccggtttcatcggtgtatgctccggcgtggcagcctccatgggaggaggaatcgccgcctacggcgccattttaggagccagcatcatcggcggcctttttgagggtgtcctcggtctattcttaaaaccgctgcgcagatttttcccttcggtggtcaccggtactgtagttatggccataggattatctctcatatccgtgggaatcaattccttcggcggcggttccggagcaggagattttggctcccttcccaatctttttgtgggagctgtggtcctgattgtgatcgttgttctaaagcactttaccaaaggggtgaccagcagttcctcgatcttgatcggcgtcatcgtgggttatattctgtgcggtattctgggattgtttcttccgaccacctacaccaatgcagagggtgtcaagcagacagcttcatgggtattaaactgggataaagtagctgccgccagctggttttcccttccaaagctcatgcctgtgaaaattgtatttgatctcaaagcgattattccaatcgccattatgtttattgtgacatccgtagagaccataggagatatttcaggcatcacagagggcggtctgtccagagaggccacagataaagagctgtccggcggtgtgatctgcgacggtctcggttcctcctttgcctctatcttcggagtgctgcccaatacatcctttagtcaaaatgtagggcttgtgggaatgacaaaagtcgtcaacctctattccatcgccatgggtgccggatttcttgtaatctgtgggctgtttccgaaactagctgctctcgtgtccatcatgccccagtctgttctgggcggcgctgctgtcatgatgtttgcatccatcgtagtcagcggtatccagctgatcgccaaagacggagtgagcaaccgcgtcgtgaccattgtctccgttgcacttggcctcggctacggtctcggtgcaaattcagacgcacttgccaatctgcctcaggcagtccagctgatcttcggtggctccgggatcgtccctgctgccctggtagccatcattttaaatgttgccataccgaaagacaaacccactgattaaacatccctacaggaggcagcaattatgaaaattacgatcctcatagaaaaccaggcgccggattccctgaaaaaggaacatggcctggctgtacacattgagtacaatggacagaattatctcttggatacaggtgcttccggtcagtttgctaaaaatgcagaacagctgggtatcgacttgtcaaaaattgatgcctctttcttatcccatgcacactatgaccattccggcggctataaagaattcttctctaaaaatcctaaggccccgctttacctgcagaagtcagccatggaaaactgctattctaaagttttatggtttcgggagtacatcgggataccaaaagacattttaaaagaatatgcaagccgcctttgttttgtctctggcataacaaagataaatcccggtgtctgggtgatttcccacagtatacacggcctttccgaaaagggacgcaaaagccatatgtatatcaggacaaaacaaggatttacaccggatgattttagtcacgaacaaagtctggtctttgaacgtgaacatgaccttgtcatgtttaacagctgctgccatgcaggcgtggtttccatcatcaacgaagtcaacgatgccatgaaggccacagggaaaaaagtttcctatatgttcggaggtttccacacaatgggacttaggggagcaaacagcatgggcggcaggcccaaagaaatcacaaaattaggacaacagctgcttgcccttaacctgtccggtgtctataccggacactgcaccgggattcctgccttccgaatcttaaaagaaaccatgaaagataaaatacattatatgaaaacaggcagcgtcatttctctgtaacgctgcccgtaaaaaggggcattcacactaaaagttagtgtggagcccctttttctcaccttatttctatctaaacttttcaatgtatccctgtacaaatataaaaaggacaatcaaaggcaggacaaaagtcacatactttctcgtccatgcagggtacttgatccctttcccttcgttagcttcctctctaaacttcttccagccccatccgtactttgtgacgcagaacagcagatatacaagagaacccagaggaaggatattattgctcacaataaagtcctccagatcctggatcgtactgtgcgccccaaacggtgtgatgccgctccacacgttgaatcccaatgcacacggcaaggaaagcagcgtgatcagcacgccgttaaagacacttgcctttttaatgctccagccccaaagatcctgcgcaaaagaaattatattctggaacactgctatgatcgttgacaatgccgcaaatgacataaacaggaagaacagggctccccaaattctggatcccggcatctcattaaacacattaggcagtgtgataaaaaccagatccggtccgctgtctgggcgtactccaaaggcgaagcaggccggaaaaataatcaatcctgccataagagcaacgatcgtatccaatgccgccacgctgatggcctccccggtaagccggtaagaccggtcaatataactgccaaaaatcgcgatagctccgattcccaggctcagtgtaaaaaaggcctgtcccatggctgccgacacaaccttcatgatcccctgctccttcatggcatggaaatcaggtaccagataaaaagacaaaccctttgccgcccccggaagtgtgactgcccttatgaccagtacaatgatcaccaaaaacagacaggacatcatgatcgtggtgatcttctccaccccgttctgaagtcccagagagcagatcaaaaaaccaatgatgatgaccacaagcatccagaagatcagcacttccggcttagataaaagctcactgaaaaccgtctgcacctgcttaggatttttcccgacaaaatctcctttcagcatcttaaagaagtagctgatcatccatcctgcaaccgttgtataaaacatcatcagcaggtaatttcctgccattccgaaataactgtaccagtgccacttcgttccctcaggttccaatgtctggaatgaggtggcgatactcctctgactggcacggcccaccgaaaactccatgaccatgattggcagcccaagagcaaacaagaaaaacaaataaaccaacacaaatgcagctccgccgtactgcccagtcacaaacggaaacctccacacatttccaataccgatggcacatcccgccgatattaagataaacccgatcctagacgaaaacttttctctcttttccataattacatttcctttaattcaaagataaattctgaaccttctccttccctactttttacccaaatctgtccttcatgtatcctgacaatccatcttaccatagacaggcccaaaccggtacccctctcttggttttgagtgtttctgctcctgtctgcccggtaaaaacggttccatatcttatccagatgctcagatttgataccctgaccgtcatcctttacgattcccctgatctttccgtcctctcggaacagagatactttcacgattccattgcgttttccataattgatggaattctccaccagattaatcagcattctagtcagcagcatttgatcccctgctgccataagtccaggctcgatttcgctgagcagatgaatcttcttttcttctgctttaccagacagttcctccaaagtcgtctcaaccagcatactcatatccacagcttcaaactgaaaggtctccttccctctctcacaccgggcgatcatcaagagctgtgagatgagctcagacatctttttcgcctgacgcagcacgatcctgatctcctgcttttgctcctcgctgatgctgtcttcttccaaagcgtactcacactctgctatgatcacagataccggggttcggagttcatgggacacatccgatgtaaactgcttttcatcctcaaaagaagcttccagccggtcaaacatctcattaaacgtacacgtcagctggtgcatctcatcctccgtcttgggcactaaaagtctctttgacagatcagccccgctgctgatctcctccgcagtcgtacagatttcatctaccggctttagtgcctttttggtcattatatatccaatcactccgatcatcaggatcaaaagcggatatacagccgcaaaggccagcatgaccatacgcatggtctgctccatgctatggatggaggcaatccccctgatccaaattgctttccccgttccgtactggtatgcggcatcatagaccatccactgtttgccgccctgtttcacattcctcacctcgtgggatcggagctttagattcttcggaaattccaccggcatactcccatgaagcagtcttccgtcctgatcataaatacagaacatgacaccgtcatcataataatctacatctgagctcagataataagtaccgttctgaaactcaaattcgtctgcaaaatccgccacactcccctgcagatcttcttcagtcttagacaattccagctggttaatgaaaataaaaacaccggcaaacactactgccagcacaacagcaatcatacctgtataccaaagagttacccttttcttgattgaaaaccgcctcattcttctttcctcaatacataccctgcaccacgcacagtgtggatcaatctgcatctaaatccttcatctatttttttcctcagatagcggatatacacatccactacattggatccgccttcaaagtcgtaattccacgcatgctgctcgatctgatccctggacagcacaatattctgatgtcttaacatatattcaagaaccataaactccttgctggacagagatatttttctgcctgcgcggcttacctcttttgtctcacagtccagaaccaggtcatccatagtcagccggttggatacaaaggatggtttcctgcgcatcataacccggaccctggccatgagttcctcgaatgaaaaaggctttacaaggtaatcgtccgctcccagatctaggcccttgacacgatcttcaatgctgtctctggcagtcaaaaagagtaccggtgtattgtcgccctcatttcggatcctgcttaacagctccaggccgtcaagacccggcagcataatatccaggatcatgccatcatagtctgccatggcaatataatctaatgcctccagcccgtctccgcagtcatccactgtataatgttctttcatcagtttcttttttagaatatttcttaaatcctcttcatcttccacaatcaacaggcgcatatgatacctccatatggaaccattataatataaatgcatttttatgaaaacattttaatttaattttaatctttgggaattataataaggttatcaaagatatgaaaggagaaaaaactatgaaacgtaaaatgtcatttgcactctgttgtactgcttttgtacttctgtttgcaggctgccagaataatcaaaagaatgatacagaggcaacaacaactcaggaaattgccacaactacggggacaacagaaaaaacaaccagtgaatctactgaaactcaggcatcctccgcagatgcacctgacctcagcaaatacgagaaaaagatttcatctatcaccaaaaaaatacaggctgcaacccctggaaaagatacagctaaaaaccaaaaaaaattctataacttaaagaaggaactggatgcaatagatcatgaactggacaccctggacgacgaatacgaacaccagtatgacaccggtaaactttctgctgacaaatataaggaaattgaacgcaagattgatgcactggaagacaaattggattttgcagaagacacactggaaaataaatttggaattgacgattaatcatttttaaagaggaggtaagtaaaatgaaaggaaaaaagttaagtatcgtagtcatgggatgtctgatgggactttctctggcactgtcccctgctgtggttcatgcggacagtgatgatccaaagcctacgtccatccgaaaactcaattacaaaaagcgtacagtgcgggtcggacaaaagtttgaactgaaagcgtatgcaagaccatatgattgtgatgacgaccagctaatctggaccaccagtaataaaaaagtcgttaagatcgtaagccgtgaccggagggatgatgatattaccctgaaggctgtgaaaactggaaaagtaaagatcacctgccggatccggggcacaagcaaaaagaaaacctgtacagtaacggtaaaaaagaaagccaaaaagaaaacggtaaaaccaacccgcatctgggtggaagataaatatatggacgtggacgttcatgataccgaagacattgaatacaaagtactgccgagaaaagcaacaaacaaaaaggtaaccttcacatccagcaatcagaaaattgcaaccgtcaattcacggggcatcgtgtacggaaaacagccgggcaaagtaaaaatcacactaaaatgcaaaggaaatcctaaagtaaaggcatatgtctatgtccttgttgaaatcgatgatgatgaagattgagtaaaaatcgaaaaccgccagccacagaatacagctggcggtatttttaatgagtaaaaccgtatacctttttttcctcttctccgtggaccaagatctttgcactatccaattcttctatggattctttaaaatccctcataaacagctctgccatatcccggctcagatccgcacggcagacaatacgctggatgacaatgtcctcgagatccacaggaagcgggtaggcgggaacctgccatccgtgcatgcgcagccggtctgccagatcatacaggctccacttattattctccttcagccggtagcagacaatcggcatattctcgccccggttatagatttgaaatctttccagattttcaatctctctggccagatacatggccacatccttcgtgcggttctggatttttctataaccctccattccctgtctcaggaaattataatactgggcaatgatctgtgaagcactcctggaaaagtttaatgccatggtaggcatctcccctcccagatagctgaccttaaaaaccaattccttcggaagatatttctcatctttccagatgatccagcctacccccggataaacgagtccgtatttatgtcccgaagaatttatggatatcacattttccagtctgaaatcccaaaccagatctggttcggtaaacggcgcgaagaaacctccgctggcagcatctacatgaatggataccttatgggctgttccttggttatattcactcaccgcccggtccaaagcagctatatcatcaaattttccggtgtatgtaatcccaagaatcccgacaattccaatggtgtattcatcgacggctgctatggccttctcaatatccaggctcatatgttcagcgtccatcggtatgacacgcatttcaatatcccagtatacacaaaacttttcccagcaaacctgataaccgctggatatgattaagttaggccttttcgtaatatccacacccagtgcttccgcccgctttctccaccgaaacttcatggccattcctcccagcatacatgcttcgctggaccccactgtacttgtgcctatataggactggtcttttggcgcattccacaaatctgcgatcatattcacgcatcggttttcaatttctgcagtctgaggatattctgatttgtctatcgcattcttctccagagtctcactcatcagcttaaccgcttcatcttccatataggtctggcagaacgtggcaagatttaaccgggcatttccctcatccagaagttcatcactgatgagccgatatgccatatctgatgggatactatgttccggcaatacgtttttgggaatgacactagccatatctgcattctcaaaaataggtttttcataaatttcctgattctgattgcttttgtttttacggtcacataacatttcacttcacctcctgcttttattgtaacgctttttctgcccatataactaccaattgtaaaaagttttataatgattttagttttctgcattctttttttaatttccagccatactatatgtgaggtgatgacaatgagaaatgaagatattccgatcggttttaccatggaactggcacagcatgaaaatgccctgtctgcattttcctccctgaccaatgaacagcagcgtcaggtcattgatgaagccaagaatatgaagacccgtcaggaaatgcggaattatgtggaaaatcaattcaaataataaaaagcaggaaacaaaaaaatttgcttcctgctttttacttctgtgtattactgtttaacgaattcagggtttttcattacataattgattttggatttatcattccaatacccggcagtagccacagggaacattccaagacatacatttaccaccagcgtcagtatcagcagtttctgcttgtgctgataggactggacaagatctaccgacttatttttgactttttctgcctggacaaatcttaatatgataacaataatattatagattaccgtaagccagatgaaccagtaacggaaagcacacaaaacatagataaacgttacaacactccaaaagatccctgaattccgttcttttctactgagcagctgacggaaatgctggtctttctcactaagaacttccagttttgttccgcaccactcacagtacagagcgtcttccctgttttcctttccacaattttgacaaatcatctctctccctccgattcctcataatgttgtaactaaattatatcacagatatgtcactttttctttcatgtttgtcataattccccgaaaaaatccagccttttcttagattactttatttgtttgatatattttgaactgcaatatcctgttcgtccattgtaaatgactttatcccatttctttccttcatttaagatctctacttttgctccttttgggattttataaataattttccccattatagatgctttttccctcagtcttagcgaatcattttttgtattaaccttcccaattttcaatttaaatttgttcccagtagtatttggctcccccatttgcatctcttccataagaattccttttgcaacggcttcagcgactttcttgtagcctgctttttgataaaactcaaagtcatctttgtcatcaacaaaacatacctctaccaatatagctttgtttatcgtatggttcaaataatatagatgattggttgtttttgtacctctgtccggaaaacctaattttttcatattatgtcggatctgttccgcaacagcttttttgatcccaatatctgctgtgcaatacacttcacagcctgcagctatttgatctcctttggaatcatttcttcctgagttaaaatgaatggagatatccagaataacatttcttttattacactttgcaacgacctttttcaagacatccgattgatcttttccgttattgcacgtgcaatcatatgctttctgtccatatgattttagcagtcttactatttcctttgtaatcagtcggttttcttttgactcatctaaaaatccacatgctccgcaagctgtttttcccgccggattatgacctgcacttatgttataactgcccatcctgctttcccccatcaattttttcgtttttggattctccttcaatgcttcttgtaaatccctgatgaagacctgtacttgccaaacctgtaattgcaccatagacaatggactccattgcgacacctctatcagcaatacagccaagaaccgctcctagaattgctaaaatcaatggaatatacttattagggataaaatccaaggacttcttcatgacatagccagcaaccagacatgccgccattacgataggaatgtagtattgcgtaataaactctaaactcatatttgtgtacccctctctatttatcaataatactttctaaaagttcatctcttatttttttcatattttctatgccatttccagtaatttgatgattcaacattgcagccaggcactttgactgctgccgttgcatttcttctagtttttgtaaacggcggtaatctttctccgaatgttcttctaagagttcaactcggttgctgaacttaaatgccggatgaataattttatagattactgcaccagcaccgccgataatactgatgcttccacagattgctaagatttgctcaagcataactttcctttctatagaacaaagcggacaagtccccttcaactccctaaatccctcaatcatgagggacttgctccgctttgcgcaccaaatgcgatttgacgtagtcaaatgatttccttacgtatttgtgtgcatacttgcccgcagggcttttttattccatagggaggtttgaagaactttcctatgaaataaaaaaaggccacttaaatgggccttggataatgataataaatatttgaatatgttgtgcaactaaattcctatttatataaaaaacttatttatgaatataaccccagatagtgactttattattcacatttgttttcgttgctcttacataaagcgaagtcaaatcctttttataaatttgcacttcatcacccccaataattaatcgttgtgtacttgatgtctgtgttaaataatcagaaggatagaatattgtttgatggatatttccataacttccccatgcaactatcaaaaaaacatacgagttccaatctatattgttatattctttttctgaggtagaataattttcaattctaccaagaaattgatagtttttgaaagccgagtttagttgtacaacctcgctcttaacttcattcacagctcccaccaaattctgcttctcacttgtcgttaaattctgaaggcttcccaccgcctgctccagcttatttaaagatactgcctgctcttttgacatcaatccatccaacgctggcgttgcctttggtatcgcattggaactaattgcgatccagtccgtaccattatatctatacgtatagtctgtatcttttacattgactgtccagccatcctgtggcttaggatacatctccataatatcggtgtatgtatccacagcttctttccagtcaatatttgtctccaatgctgcgaatttattatccacttcggatcttgtatatttatcataaaaagcatttttttcttcctgtgttacatggatattaacatcactggtatgtttttttagcgtctccatagagactaatccggcaggagtaatgtttaattcaaaaggattctcttcagagtttttaaaatgaaaattccatacgattgaatacccagggctttcgtgctctgttggaatatcctttcctttggcagcctgtgcaatgcaatatagaatttctccttcatctggatcttctgcataaaatcctacctgccaaagttcataactttctgttaaaccaatattttcaagcagtaccgggattataatattatcatccgatattgtagccggctgcagcgtcaattcctgcattggattggtaacctctgtctgctgcctgagatacatcaccggaacttttccagcacctgtttttacttttgttatttttagtgtttttccgtttattaatctattatgtaaatctgcacctttttctgtcaaagatgcattttcccatatatccatttagttcacctcttttttaatattccatcaggtttggtttatgacaggactcttatttaaagcacttgaacttgataatattcatgttctgaaatatagagtccataataaatatggactactgcctcaatgatttctgaaacttttatttcatagacaagatgtgcaggtttcactctatcaataaaaacttttgcaggctccagatctgatacataacccttgacaagaacactgaatgtattcacatcagtattttcttttacttccacttcgtatcccagcattgaagtaaggacatcttcaattctttttggattattgaacctgcgccccattttttccaaaagatttcttttccgttcttcctctgagacattctgcccaggtactatcccatactgcttttcccaataatcaagagaccatagatctgcagtctgaacaaagatctgatccttaaaatgatctggaaatacatctaattcatccagaactcttccaatacaattaaataaatgcagtcctgtataagcatctccatagacaggactcacaaactctataattttctgggcttctggactggtcagtatgttatccattaattccgttttattatgcattcagatcccccctaattactattttcaggttcgtgcaaagtgactgctgcctcaggaataacatttggatcaactaaaatattatctgtttttccttctatttcaccttctttgcagatcaacagaccggaataatcataaatcccctcagtatcacccagaagattagagatctgagtatatctgattttaccttcatctactgtagttttcagataagagttcacagactttttaaacgcatttgtcacagtgacaagatctgcccctggttttagttcaacagtagcagttatattgattacaagcttatccggagttactacttccaccaaagcattgataggtgccagacggttttcgggattatcagggctcataatatagttggtcaccttgtcctttaattcctgtaaatctaattcatcatttgaaggtgtaattacaatcttcacttttccgctattatcctggggactgaatattgttgctgtatctacaccttccactgacaatgcccatcgtttatagtcactgatattgcctacaaaagagtctccctgggactggtcatattccataatccgctctctcaggctctcatcatcttcttcctctgccccaccggtaatcggtgctggatttgttacctctgtaataccgtcaatcagatcctcttcaagatttacagtattattagcactatttccattcagtcccggctccgtacattggatttttacatccacactgccttcagaagtaattactgcttcctccaacgtttcatactctttttccggttcatcattgatactttctgtagtaaatatacttccttctgggattacagtgcccgcagttcccgtaatatgtaaaactccagtggcattaatcgcttccttccgctgaaaccctctcgtctctgcatgatagtcaagataagcaccttccgcgtatcttggccagatcagcttcaatgcttccactaattcaaattctttcattctggatacttcaatcgcagtgggtcttgtgagatcatatacataacctccttcagacttgtctatgtcatcaggaagaatgtccagcatttttttatggatttcttcttcactcgattgatctaaaaaggaaggaattttgaaatcatcctcttccaattcttcctcatctattgtttctaaaagttcctcatccatctgtatcctcctttctatctttcgattgttgctttcagttcaatttcattggaatcaattccaattacattacaggtaacttccagtgaatcagcattcatccattgaaatgttacggactgtaccatatccgttcttccatagggatctgcctctaaagcctctgtaatctcattttccagaatactttctgcttcttttctcgactctgcctgaaaagcactctctatatcaattccgatatcatcactgtaggcctggcacacatatcgttttgttctcaatattttcatgcaccactggatccatgcttccactccgttggcctcaaccagtttcttagtcccatctcttttaaaatcctccagattatcatcgaaatagatgctttttttatatccaacagcttcttcatccgagtcatcatcaatttcatccagttccaattcttcatcttcaaaatcttccggaaaaagattatccatgctatcacctctcattctttccctttagatattttaccaatcaccaccggagtctcatctgcccataggacaacgacccgatcctgatccttcaatacagatttctgtctgcttgtcacatcctggtcctcatcaaacttacagacaatatattccccttcttccatgacatcctttggaaaactatccaataccagccctttctttgtaatagttccaagctctgccgtgggggaatatccaaaatctttaacttttcccattcttttctgcaaaattgcagccagtctgacacttccttttgcagccattatttctcgacctccaatttcatcttcccatttagacagtcatgttcaacgccaacaacaatatagtatcctgcaagtgcccctgcattgcttttaattttgtggccctttctgacataaggattattgacagcctccaaggttctttcgtattttggttttccgtgctctttcaggatttcctttgcttccttcttagcgtgaactgtttttttatcatcggaatctctcattatgatttcttgcaatgtaccatatttttttgtatcaccttttacaacggtaacttttttaggaggctgttccttggtggattgtgattcctgctccctataaatagccacttttgttataacgccatccatagtaacctttgtattctcagttagagctgattcttttttgttaatcgtatatattttggtgtttgttccccttttttttactgtcagagctccgccttcaaaagaaataacatattttgtaccagttttctttttcacctcattcagcactgcaataatcgcatctgatacgttaacttcacgtataatggtccgtttgtgtttaatgttcttatactgaaagtcgagtttgactccccatcgtttacagattgtctgaagaatactcttcgtacttttccctttagcaaagaaaaagttatcttttgtattctgaagataaatcagtctgtcataggcggttagtgacaggtcttttgtaacgtcactggtataatctttctcccagattgtccccctaaatatttccttataatgcttcccagtcttacaggataatatcagagtgtctctgaccgtgatgttattatacaaatacttctttttatctttgatattaggtattgtaattgtaactccctgagccagatcatcctgattttgtgtaaccgttaggccagttaaaatcttggaaacattgtaaacagctttttttgttttgatggtacatttataaatagggttctggagtgtcccttccataagatttcctcctaactaaccatcttggtcaaagttttgatacctgccattccgtcagcttttaaattatgttttctctggtaggttttaatttttgcctttgttttaggtccataaattccatctttcgttgctccgactttgccctgtacgaacttaacgacttcgcccctgcttccgcttttaataacaatttttttcaaaatggtctttgtggatgagtctagctttccatttaccggaaccttgccatattttttatccttattgatagctttctgcaaagcaaggatcgataattttttcttctcagctgcagtcgctggtggaattgtcagcacctgtcctctataaattgtgtattgggattttactttttttccctcttttttctttttcgcattttctttatcaattaaagtcttatttgccttataaatcctttgatactttgtaccatcaccataaaacttcttagagatatcccttaaagtctctgagtttctgcctaccttatatttttttgtacctttcttacttttcctcacggttcgcttcagttttaattctgccgcttcgataaacgaaatcgtatatttataatctcctgcagcggaaagggtgcaggtaaattcatttacatacattagctttgatttaaaggcagttttcgatatttcaacctgtacttttttatgtttttgccgccaacgctcaatcttatctatatagaaaccgggctgtttcagtgttccctgaataaactcaaacttttctctggtgattgccgggaaaataccttcccagccgatagtgcacaaattacgtcccttgggaatgctgacttttcctaaatctaaaatctcgtactcttggagcctggaggaatttttgtattctaactctcctggcagaagcggaattgtaataccgccatctttatttcccggctcgtataatttaatacttacttctttcacattttcctcctttcatctgttatgccactggaatattcttataggctccttcgacagcatctgcaatgatagaacagagctcatccgacacctgtcccctctgggcttttaatagctgcagtaaatctacattttttccagatcctccaccgtttccttttacattgatagaaatattgcctacagaaacttttaccggagattttttgtgatttgccgaggttttgcctttgctctctgttttatgtactgcagtctttttagattttttaacagacccagccgacttacctcccactatcgctccattggcatagcccgggactccaagcatagcacctgcctgattccacaaatccaaccctctttgacgtcgcttacttcccagtggaatgatagcctcaggtccatcttcgcccacatagctcagtgttgttttgtttacaaaaccaccatccgcatgtggaattgctggagatgcaaaaggtagcaatcccccggactttgacttatgaagtaattctttttgtttcttttctctttctctccttgaaatcctaggatggcttcttcttgaagaatttctttgacctgagtgtgtccctacatttgattttgatggaagaataggtttttttataccaacattccagggctgaagcatttgaagaactggcggtttcttgggtttatatatttcttctttctgtccaggtttcttaataaccaacccatttgcagtttctttgatccaataagtatttttcttattatgagaatctggctttttgggaacaagatcttttttttctttatcccagactgctccatttttatctcttaaattatctaaataattatcttgtgaaaatcccatcgccttccccagagctttcttgattccttcttttgctatgcttcttacaattttcggaactttgatattttcaggtattttaatgtttttgggtaatttgtttccggaaattgaaataattttgcctactcctttaaatactgtgcctaacaatatatctcctgatgtgtccagtattttttttgcaatttcctttccaggatcttctgccactacaacatcgtgtatatcagatattttagctaaaatttgggctttcggactaattacatctcttatttccttaggtaatctattcattgcattaccaatctgtgggccgaacaaatcattaaatgtattgtcatattcttgatctgcataagctataacttgatttttaattttttctttccaataatcaacaacccctcttctaaactctttctcttcttcagcaagcttttcggcttcaggcgcaactcccatattagaattgttcattacccactctgtagaaacacttcctgaagataatagtttattcttttcattcatttgccaccgatttggatttctgtcagagaagaatttttttattcttttattcatctgattttccaaatatttaaattcctgtacttctttctgagaaaaagattttttctctcctgcaacaattttatcaataccttttggtattttccctgtcttagcataaatctcagcaacttttttatttgtcccatatggatctttttcaaaatctaaatcgccaattccaactttctttttctttctatatccagtagaagtatattcatattcatctccaccaatcacaattgtgtctgacaatttactccccctccttccattccaaataattttccaattctatttctgtggaggcaaggacaaaagccctctccccccggcccaagccgaggatctctgagggcagttttccctgtttctgccagatgtaatgtagcttccaggctagcggactagcctcaatcagttttttgcgtagtcctccacagttacctcagagtcataaaatccacttagtttatcaatttgatcgtcaattgcgtctttttctccggctctcagcaccgtattaattacatcaattccctgcagtacagaaaaaccttttctttcaaggccatccattactgttggattatcccacacattttccttatccacggttgccagatagattttccatgcagtaaattcttcaattcttaactctttttcaatcggcggtaatttaggattattggggtttgccattttcactactgattttcttcgcgcagtcagtaattcctcttcactcaatggacggattttaaaggaaaaaaacaatttacctttccttttgatctggatttctgtctgaagagcgtcatctgttctgaaatctgctgctgccagcagcccctgtactaaatccatctcattttcctttgtcacttcgattccctgttctacacttgtgttcgctacattttccatcttttatatcctccttatttaccgattgataatatttcttcaaaaaccggaatactgttgatcgtgaaactctgctgtctggtaatcacttcaccagctttcaaagtcataatgtcaaagtctccgtttggaatacaattccttagtgtcaatttttgttcctttttatccaaagaacgtgttgcagtgctttggaaatcatatttcggtatttcaccctcggcaagctttttcaggatcggatccattaaaatatcatctctgacaactgcccctgaaaaagtaagggtgaatttaaccttatttggaattgaatactcctgtacatcccctaatggctgatattcgatatttccaaagctggccttaatctcataatcttttatttctgctaataaaattctctcttttccatcaaaaataaataattttccgtcatttcctgtcattactgtacgtacatcaattttatcactcattctttctccccctattctcctgaaaagctgaacttatagttcagataaattttttctaagctgtcaatgtcagatgcctcaataataaaatgtgcattatccgggccatgtgcctgttccggatcctcatagaaatttgcaccatccattaattttccttcgttcaccattgcgatcaaaacatcctgtgccactttcactacattggaaataccgtctgagtcacagtttacctttccaaccagaggtgtgattgttctgtcgattctgtcaaacatttcatatctggtcattgtacggcggatctttttccatcctgcatcctggttttcatttaacgttgtcagtgtattcactccgctgtcaaaccaaacttccccctcctcacttggtgagagaagaagcatgccgttttcaatggcgtgaatataatcttcgtttttcaaaacttcaagagtatcgactgcattcggaataacagtatgtacaacggacttattggatggagtgcttccgataatacctgcctgaatagtaactgcctcatagccgtctactttattgccctctgcatccacataaccgcttccagcatagataaagtattcggaatcaaatgattttgcatgttccatccgctcttcaaaagcaacatcacttccctctccgacaacacaggaaccaatggaaccattattctttaaccttttcatatatgcttttaacagctcatgtacagcagtatctacggtatctgttacgagaacattccacttataagcttcaaaggcctccaatgccgcactgtattctgcgtttgtaactgtgggattggttcccggagtaatctcctgctgtacgactgaaactggttttttgtcttccgcagctttttcagcatgaaaaacagctgattttgcgttaataatttcagtaagaatctgtccttcatcaccgtcagcctgtacttcatattcaaacttttcctttaaaacagctccctgatatacagaaaactctctctttgtttcacttcctaatttctgttttaatgagaccgcaaatgtaatatccgttggatattttgtttccagagaaaccacagctgcatcctcagcatctttcagatccagtgttcccttggtgccccctgtccccaaacgatacacatgaaccttggcagcccctccttcaaaaagattcgttgccccttttactgtccctcctacaccatacatttccttgagtgtatcctgttttgtgtgaattgtgacaactcctacaggaccaaaatcagcttttaccggaattgcaaaaactcctgtcatcgctcctgctacaagctttttatcctctgttgaataccttctgtaaactccgggtcttaccttttcttcccctgcctgatatgttcctcccatagtctaatgtacctccttgcttttataatcatttacaattttctttgcttctttttctgatgcttcttctagtccggcaaaagaaaaagcagctctgatcagatcctcagatgctgcaagaacttccggattggaagcaaattcttccatgctgtattttacctgtgatttcaatactatccctcctgaatatcgatattacgaattggttgcttctcctcttcctgccgaaggaccccatactggcactcaataaagaactgccggtgcttcagtgggttcagagtatcattataatttaccttcataatgtataaaggtcccccgtcactcatggtcagtgacttaatacctgccagcttttgcgtaatttcccgtatcatagaaagctttttatactgctctgctataatatggatcctgataccggcagtgatccaggaattacaccacgtatctttataagatcctggagccatgctttccagacggcaatagatcgctgattcactatttcctggtttccaaatatcttcaagtggatctctgctgattataaccgcatcctcgaaagtatttttcagccagctgtttaatgcagccaccggatctggctctatcatttcctgctttgtaaaaagcattccgttgaatgtgtagatggtctcctccactgatgttccactttctagtacagctggttctgtatgactccaccttgtacccagagttacatctatctttgtaaaaaagcaacggtccagcgccgtaagaattggcattttgaaatccagggaattggtctgctgtcctttcttacaaataacgtgaagacggatccttttgctaaattctctttccatttcttcctttaattctacttcatagatcatccttggatacggatcactttcccacagttcatcagaatcatcgggagctcttttttgaaatattgccggctttccattatattttgccagaagcttaacaagatctgcagaatctgctaatctctgataaattaaattttctattttgcacacctcctaaaaatacttttatcattacagctgtattacacgacgggttgggaattccttttttcatagaagaaaacaggcgggaagaccaaatttcataggtgggatctcctgcctgttttctctattataatgatatcattctgccagcggacattgtgggcagattttctgcctgtcctctaccgacagggaaaaaataaaagagagaaatgagatccttttaaaaatggattttcaatcttttaatttctatgataactatatcattatctcagcggacattgtgggcaaacacctcatcacagaatttctggtacttcctcgatgcggtccttctgtccatccccagttcttcccctatctcctgccatccaagatgattgatcgagcgcagtcttatgatcagtctcagctctggatcttcaatttcctgtaaaaaacgttcaatctctgcccttgtatatagtaatttcttcactgatatatcgataagatttttgatctcttctatccgcactgcatagtcagcagtcttatcgctgactcctcctccaaaaggcataccggtcaaaatagggcttttcatcatactcttgcattccatccaattcagttcttcatttaatctttcaatttccttattcagataatacatctgtcccatatctttttctgtcatcgtattcctcccctcttcttttatcttatatgcttccagtcaatgtacaccgctccggaggttggcctgtagattgataatagtggcttcatctttttcacagaacgaccgttgaaacaaatctgtctcctcttaatttcctccaatgcccttctgcggtaccgttccatccagatattgattaattttggtgatattccataaaactctgataaatcctcttttttataatgatgcagtaaaatcccgatgactgtgtccatctgtccctgctctgtggtaaagtcaaacataacaatctcccttccaattttgtatattatgcctattgcctttcacgaacttatgttctatactctttagtaaagagcgtaattttgttacggctgcgatttcgtatgtacaaacagatattccaaaggcagatgaggaaaatatgctgtttttaaacacattgcttcctcaatggtgaaccttccggaacctgacagcttgtccactacgtcctccgcctgtaacttcaatacactcgctgcttcttcgtttgtgatattggatttcattaattccattttcaaatttatatatggcaacagtctacctcctatcattactcatttgcgtaatctctattgtcatgatatactcatttgagttatttgtcaatgtaattatacgcatttgcatatttttttatttacttaaactttttaatatgctattctttctatagaaaggcggtatatttttatgggtattggatcaaagttagagctgttgttaaaagaacatcatatgaatcccaacgagctggccaaaaagatcaacgtggcacctaccacaatctactctatgatcaaaagagacagccggaaagctgatatagaagttcttttaaaaatctcaaaggagtttggagtcaccacagaatatttctgtgacgatgaatctctgatctctgacaatcaaaatgaaccatcttatgcagatttgaaaacactgatcgcaaggaatgggaaggaaatgtccatcgaagaaaaattagaacttataaagatgttatctgaattataaaggattggtggatttgaattatcacgatatacttcttaagatacttgatgtttacagagactgtgagatccagtcatttccgattgactgctacagtattttaagacactacggataccggattttcacgtatcagaacatgcgggacatcaatgagcggctctatgaatactgcagaaattattctgaggacgcgttccgctacggtgccaaccggatcattgcctatgatgagacaaagtctccttttaggatccggttctccattatgcatgagctgggacatattatgctggggcattccaaagaatgctcccaaaatgagcaccaggctaattttttcgccagcaatatcctggctcccaggatggcgattcattttgcccagtgcagagatgagaatgatgtttcctcctgctttcagatcagcagagaggccggttcttatgcatttcagaattacaggctttggagagattctgtatccagagatgtaagcgacattgacgaagctatgtaccatcatttttataatgaagatatcggaaaatttatttttagcgtcacaacgtgcagtatctgcggcgagacgatctataattcaacagatgacctatgcattcactgtaagatggacaagataagaagagagtgcgctcctgcacatctgacaaaagatgaccggatcctagttcatatagaacagcagtttttaaacaatatatagcaaaagaaacgtgaaaatataactaaattctgatatgctcccttccaggcagacaaatacaataagaaaagcttgccgcttagacgggagcatattttatagaaagaaaaaatacgggaatgacacaaagttatttacaagcaacataaaaactgccagcaggcagtacctactggcagaaaaagttttattttttattctctgctttgcggggaacggttcaaaatgtaaaaaagtcttaattactacagtgtgtcgattccttattataataattcagacaccatgatcactggcttcccatttttataaccaacaatctttattgctaaacgcgaaatgtgcccttccgcatccttaaacttagggtcaatctgtactgtctctccagattttattatctctgccttgttggatggtccaggaataggagtatttctcaaatcgccagactcaaacgtcatataataaagcgtaactccatttttagcagtgaaccacatactctcttcattattacttctgcctaagtaagttgaaatataaccacaactgcctctgccatacccagaacacacatctgaaaaactttttgtaatatcatatctatagtaaatagaattatccttaaatgtgttcgtgctattcagcctattattaaagtcttctacattgatggggtcagagagaccaggtactttcccattataaggttttccattttgcgtataatcagattcagcttgtatcttataagtttttacatacttcccttttgtgtcatacagcttaattgtgcccgtcgcgttgcctgcagcttttttcattttcactgcaaaatatcctgtcttgctgccagcctttttcgtatacgtctttccattcatagttaatttaattttgtactttggccttgcatatcctttaatgtacttggaagtctttgaaaactttttaactgaaattgttttggctaaaatagaaacttttttcttcgtgtagtacttccatcttctccctgatttccgataagttttcacaatcagactttctcctgccgtctgtttaggaatttttacgctgaaatttcctgttttacttgcatttgctttatacgtctgctttcctattataacccgcacctgatactttttcttggtctttccttttacttgtgttgtcgtatcatacaccttatttacgaataatttctttttagctgctttagcggaaattgatggcatcatagaaaaagttaaaaccccgctcattgctatgattgctgctttttttattaatttattcatacttctcctcctttatttaaacaagctccctgttctattttatcataattataatgaatgattctatctatatttatatctcttccggtcttcggtaagaaccctgtaaaactaatgttcttaaattaaacataatcaaattcgcagaatttttctatggaaatcaggactaccggctcagccggtagtttgtcctgtccctataagggaccgttacttgtcttgcatctaaagatgctctgatccggtccgccaaccacacttcgttctccgggtgcccgttaacgggcctctcttccccctactttactggctcacccgtaaacgggtcgatgtattctttcagggtcatttggtcgtattcgatgtcctcttgtagctgtttctttatatattcctctatctttttttgcatttttacctgctgtatctacgtaatatcctctacaccagaaatgtcgattcccatacttgtatttcagatttgcatgccggtcaaatatcatcagcgaactttttcctttcaggtatcccatgatctgtgacacactgtatttgggtggtatcttgatcagcatatggacatggtccctgcagcattccgcttctatgatctcgatctcctttcgtttgcataacatgctcagtatgtttgccacatccttcttgatctgtccatagattatctttcttcgata

SEQ ID NO: 22 - DNA, 64406 bp, Anaerostipes rhamnosivorans
agtatatacagaactatgttataattattataagaaataaaatcaaggaggaaatattatgttaaattttcagtactatgcacctacaaaggttgtcttcggcaaagggactgagggcagagttggggaactggttaaaaaagaaggatgtaaaaaagtccttgtacattacggcggacagagtgccaaaaagtccgggcttcttgacagggtcttcgactctctgaaagaggcgggcattgattatgtgagcctgggaggggttgtgccaaatccgcgtctctccaaggtatatgaaggcattgagctctgcagaaaggaaggggttgatttccttttagctgtgggcggaggcagtgtcattgattcctgcaaagccattgggtatggactagccaatgaatgtgacgtgtgggacatgtatacagggaaggaaaaagcaaaaggatgtgcgccagtaggcgtcgtactgaccattgcggcggcaggaagtgagatgagtgattcctctgtgatcaccaatgaggacgggtggtataagaaggcattaaatacaaattacgggcgctgccggtttgcagtgatgaatccggaactcacctatactcttccggagtatcagacagagagcgggtgcacagatatcatgatgcacactatggagcgttattttgtggcagaagataccatggagatcacggacggaatagcagaatccctgatgcgtactgtaatgaaaaatgcaaagatcctgcttgatgatcctaagaattacaatgcgagagcagagatcatgtggtccggaacactgtcccacaatgacctgaccggatgcggcaccaacggaggtgactgggcgactcatctgatcgagcacgaactgggaggcctgtttgatgtggcccatggagccgggctggccgctgtctggggaagctgggctagatatgtgctggatgaaaaaccggagcgtttcgcctcctttgcggtaaatgtcatgggagtggaagatcagggcgatgcaaagaaaacggcacttttagggattgaggctttagaagatttctaccggtccattcatatgccgaccagcataaaagagctaggaataagccccacagaggaacagataaaggaaatggcccagaaggctaccgtaggcggttcctatagtctaggtatgttcaaaaagctacatgcggaagatatcgagaagatctatcgtatggcactgtaagaacagtgcagagaaaaactgtaaaaaggaaccattctactctgagaatggttccttttgctaatgaggaaaatacttataattctcctctggattcacggtcgatcaattccttcataatggaatcgtattgcttatccagcttatagaaagaaagagtgatgacggctaaggctgcgacaataaccggtccgaccttatagatgttgatgatcatatttagtgcagagccaggctgtgtcacagctccggcagcagagcttatgtaccctgagagggagagaagccctgtcatggcggctgacgccacacctgcgcctacctttgttccgatggaacctcctgcaaagatcaggctttcctggcggatatgtgtcttccactgtccgaattccaccacgtcaccgatcataccaaatacaactgcgtttaacggtgcaagtccaatggcacgggctacacagctcatgaccatccaagggaagctgtacggattcaggaaaaacagcagctggccagccagtgcgatgaacgctccggcaaatgcgacgtttctttttccgaactttccgatcagaggtgcacaggcaaagatgcaggccactaaagtgagtgtctcagtcagatacagggtactgtacatccaggtatcattgtggaaaatatatttacaatagtaaggaaggatggttcctgaaataccgaaggatacactctgaagcatccagaggacaaggactgcccagaaatattggtttgtcaccagggctttcagaccttttttcagcggaacactttttgttttgtcctttgccgcaatgacaacagtctccttacatttgaggaaacagttgaccagcaggatcagggcgagaactgcccagatggacattgtttttacccatgcggcctgattgtctccgaagatctttaccaacggaagggtaaaagtcacggcaacgatacgtccgatcggtgacaatcccattctgacaacgcttaacatatccctttcagaggagatacgcgtcatcatagcagaaaggcttccgtaaggaaggttgatggccgtatagcagatggtggtacagaagttatatgtaacaaacaggtagattccctgtacaattcctgttgtatgaggcacagtgaaaagtagaacggctgatagagcataagggatgctcatccataggatccacggccttgattttccccattttgaattggtgtgttcaacgatcacacccatgattaagtcagatactccgtcaaacagccgggaaagcagcataaccagtccgacggtggctgggttgattcctacataatcagtataaaaaagtgtaagcaatgtaccgatcattccgaagatcacattacatgccacatctccgcccgcataggaaactctggttccccagctgagtctgcctcctttgatagagtttttctccattataatatctctcctttttccaaatagtgtgccaagggaaggatgcgcccgctatgtttggcaggcctccttcccggcagttgctttacaatacagggttttctatactgtaatttcagaaatttttactgggcggtgttcttctaatgattttttagccgcaagccccataagtactggctcaagaccgtccataactccaagaggggtgtctgtgtttttttcgatggcgtcgataaagcatttgatttcttttgcataggctgccatgtagcgttccaggaagaagtaaagaggtttttctcctgtcactccgtccgcattactgatcacggctgaggatgcggaatcgtttgctgttacgaccattccctttgatccgaacacttcagctctctgatcgtatccgtaaacggcttttcttgagttgtcaatcacggcgatggaaccgtttttcatttttaatgtgataacagcagtgtccacatctccggcttcaccgatggcaggatctacaaggactgcagcttctacatacacttcttcagcgtcacatcctgcaaggaaacggaccatgtcaaaatcatggattgtcatgtccaggaacattcctccggaaacttttacataatcagcacttggcggttcaggatctctggatgtaactttgatgatctgtgtctcaccaatctttccagcagccacggcatcccggatggcttcaaagttatggtcaaaacggcggttgaatcctacctggtattttacgtcgcttttctttaaagcgtcgactacttcctgaatcttctgtacgtcatggtcgattggcttttcgcagaatacatgttttcctgcttcaatagcctctacggagatcggtgaatgtgtatctgtggatgagcagatcagcactgcgtcgatctgaggatcatttaagatgtctttgtaatctttggtggtattttcaacacccatttcttttgcccatactgctgtgtcctctgacataaaaggatcagcaagagtcttaacctttgcgtttcctacctgtgtgcagatgctttctacatgtactcttccgattcttcctgctccgataatacctacatttaccataataataacttcctttctcatatttaactggtctgatttctttatgagttaatcatatcagggcaaagacttaaccaaaactagtactttttttggattttatagtattttattagtaatatttttgtgggattattttttgtgtcttatttttggaaaatgaggctgcagcaaggccaaacaaaataagatctaaagaaaagaccaaaaaaagaaacccagaattaaaatctggatttctccttttggttgattcgtagttaaaattcagcgatctgctgaattgcatcctcggagaggatggtttggaaatgttcatcaaataaagctttcgtcgcataagtatttgggatacgcttgctgtactcggacaagatgttgcggacttttgtgaagtcgaacttattatcctcagaggacaggcacaaataataacagttattttcagtatctttatataagcggctttcgtgtggaaagctaattaccagttttgctgcatatgcaacttcttccagagaggagaagcagtatacgtcacagttggaatccatgatggcaagatgcatggcatcagccagatcagataagtcactgtcagaagcctcgtcaagaaaattaagtactccgtcggaatcatccagtttcagatcatcggatgacatcttggaatttactaacttctcgtaacggtcgttaaattgatcagcatcctccacttttgtgacgacgagtatcagacattcctgggagaccgggatcgcttctaccatcaacggaatattattggtctcaaaacctaattcctgggaagctttcttcatgagttctcggaacagtcctttggccttatcggagccaaatgccagctcgttgagcaaagtctcttttccagcaaggtcagctttattcaaagtacatcggatttgattgtcactgattcgttctatcttcatagtcatcactcccttactttatattatagtatagtatcagattgcatatgtgtaaagtgtttctgaaaaacttacaaaattatacaacaatacttgaatgaatttacaaaatttgctataatagatttacagcatatggaaaggggctctatcgtatgctgaggcgccgcatcttcattgcccttgggcgatgtcttaagtttatatatcatagcacttttctggctcatttcacaagcatttcagaatggagattatcatgggacatcacagtgatttattggattatttagaacttggattggcagtccaggtcgatggaatacccgtagacaatagtaatcaggaacaaatggatcttatgctcagggaggatgattcctacatgaaagacttcattgacgatgagaaaggggagatctgtgccgtctattatcaaaaagtaaccaatcaataataggaaaccagggtcaaaatgtctttttgatccaacaatttaaaatgcgtcatctataccaatagtatctcaattaagccaagggattatttctcttggcttaaataggattgaattcccttataaatggcctgagcggccttttcttgatagcttttatcctgaagctgctgcttttccgcctcattgctcaagaaaccacactctgcgatgacagtcacatacggattgtctctgagcaaaaagtaatcactgttggcttttgccactctgtggttttctggatctaagttttctacaagggaactctggagacagtcagccagctgttttcctttttgggagccttgatagtaaaatacctgcgcgccgtgtacatcgccgcttggatagctgttctgatggatgctgacgacaaggactggttcagcgtcaaatatgatctgttttcggtttgagagatcggacacctttacattggtggtgctggtggccagattgtagtcaccgtccctggtcatttttaccttgaactttttcttctccaaaattgtttttaatttttttgagatggagagattgatatccttctccaacacgctgccgctgccgacctttccgggatcgctgccgccgtgtccaggatcgatgatgatgacattctgttttccgatagtctgatttacgaagatcggaagagtgatggaggatatgtaaagaagaacgacaatacaaaaaacagcaacgcctaaaagttgtttgcgatatttcatttggagacctcaagacttttgtaatattatattcaggttagtgttggttttatgtgtgacattttttacatgatttttgttcggcactatcgttttgagcgggtccggtctaaatattcgtttgtcatttttatgacctggcctgacagcagtgtgatcgagatcaagttgggcacggccatcagtccgttgaaggtgtcggagaggttccacacaaaggacaagtgcaggatggaacctaagaatataaaatataagaagacgagcttgtaattcgtcactgcccttttgccgaacagataggccacggctgtttctccgtagaaggaccagccgatcaaggtggagaacgcgaagaacacaatggcgatggctacgaaagcggctccgtaggggccgaagactgtggagaatgccgcactggtcagaggtactccgtttaatagggagtcgaagtgggaggtggttccctgggctgcgtccagtgccattgcgtttaagtaggtgctttcttcatagacgccggaggtaaggatcgtgagggctgtgatggtgcacatgacgaccgtgtcggtgaatacttcaaagattccccacataccctggaccacaggctcttttgtatcagaatttgtatgtacggtgacggagcttcctagtccggcctcattggagaagactcctctggagattccttttttcatggcaagggtgatgccgtacccgaggacgcctccgccggcagctctcggggagaaagcaccgtggaagatggattggagtgtggacggaacccggtcaatgtggacaaaaatgatgacgatgcagccgagtgtgaacaaagctgccatgaccggaatgactttttctgtgacgctggcaatccgtttgatgccgcccatgatgacaaaacccaccataaaaaggcctataaggccggtgatgacaggggagatggaaaaggtggaggacagggcagatgacatagaattggcctgcgccatgttcccaatccccagggaagccaggatgcagaacatggcaaatagggaagccagccatttggagtggagaccccgttccatatacaccatggcgccgccggcccagtttccgtctttgtccctgtagcggtatttcatacccagggttacttccgcataatgcgtcatcatgcccaggatagaagaaatccacatccagaagacagcaccgggaccgcctgcggtgatggcagtggcaactccggcgatgtttccggtgccaagagtccctgcaagagcagtgcagagggactggaactgggagatggaagcggaatcttttgttttgcggacgtcagactttttgaaggaggacaggagagtggcagagatccagaggccaaagtgtctcagctgaaagaattttgtccgaaacgtgaacatcaggccgatgcccagaaagcaggccagcatcggtgttccccatataaaggaatttaacgcgttgttcagatggctgaccattgaaaaaacttgttccataggtaagacttctttccggtaattaaagcattatattcagtcaagcaggtgatttatgaatgaagtgcttcttctatattaaataaaaactcttgaagacgctcaacctgctgctttatttttcctggaaagtttgttatactgattactaatggggttttctctataagaaggatgggaattatgaatacgattgtgagaaacgttgaaaatacagacaataaggaagctattcgggaagcggcaaagctcctcagagaggggcaggttgtagcttttcccacagagactgtctatgggcttggaggcagcggatggatggaagatgccgctgacaagatttatgaggccaagggaaggccttctgataatcctctcattctgcatatcggaagtatggatatgattcaagagattgcgtcttacatacccaaactggcgaaaaaagcgatggaagcattttggcctggtcccctgactgtgattttaccgaaaagtgacaatgtcccgaaccgggtcaccggcggactgaattctgtggctgtgcgcatgccaagccaccctgtggctttagctctgctcaaagaggcggggattcctgtggctgcacccagcgcgaatacttcaggaagaccgagtcccacagaggcagaacatgtagttgaagacctggacggaaagattcctatggttttagacggcggaaaagtagaagtaggcgttgaatcgacgatcgttgattttactggagatgtaccggtgatcttaagacccgggaaaattacgaaagatgaactagagcaggttctttcgacggaggtgcttatgggcacttttgcggtgaaagaggatgcggtgccgaaggcacctgggatgaagtataagcattatgcgccgaaagcccagctgatccttgtcctcggaacggatagagaaaaagttactgaagagataacaaagagagtccatgactgccggagcaagggtatgaggaccggagtcattgccacggaggagacgaaggacgcctatgacgcggacgaagtgataccggtggggagccgtaaacatatggagacggtgacggcaaatctgtaccatgtactgagagagtttgaccacagagatgtggatatgatcttttcagaaggatttgaaggggaagaatatgaagaggcggtgatgaaccgtttggccaaagcagcgggacatcagataatccgtgtttaaaaggagattagtttgaaaaaaattatatttgtaagtacgaacaacacctgccgcagttttatagcggaatcggtgctgcggaagtatttaaaggacgcccacagaagggatatccaagtggtatccaaaggcctggtcgtcttatttccggagccggtacacacaaaagcagcagacctggtcagaaaaagcgggatagagatcgtggatttcaaggcatcccagctcacacaggaagatgtggagaccagcgatctgattcttaccatgaatgataagcagaaagaaaaggtactggaagactatcatggatataaggaagtggccaccatcaatgagtatgctaacgatgaaggcgctgtcatcgatccctatggaatggatgacgaagactatgaacattgctttgtacagattacacaactaatccataaaatatggaaccataagttaggaggaaatgaaatgataggtattggaagtgaccacggcggatatgcgttgaagcaggcagtcatcaagcatctggaggaaaagggacatgcggtgaaggattacggatgttattctgaagaatcctgtgattatcctgtgtatgcaaaagcagtggcagaagggatactgaaggacgaagtgaaacagggaatcctgatctgcggaacaggtatcggcatctccatcacagccaacaagattaagggaatccgtgcggcactgtgcggggatacattcagcgccagagctacaagggaacataataatgccaacattcttgctctgggagcgagagtgaccggagagggactggcattggatattgtggatacatttttagagacaaagttctctaacgatgaacgtcatatccgcaggatcaacatgatcgaagaataattttatttaagaaaaaacatcgaaacggcacctttttaggaggtgccgttttttgcagtatgacgaaaatattcttcgtgtgaaatatgatgtttaaggatccattgtaataaatcctcaaacgacattttatttgaagctatattcaaaaatgtatcagacagttcttcctgagtgaatcctgaatgagttggttatgaagtagaataatttgttctttagtcaattttatcatttggcaagttcctcatatgcctgcctgtttttatcaattagtcttttagatacagaaagaatatcttcatttattgcaggctgttcttcttctcaacactaaaatatcatataaaatgcggtgtgcccttttgagtataaaaagatgaagaaaaagaataaatatcaggtaattatggaaaaatacagtatgacattttctacaagatctccgttccgctcttggactgcctcactcaaatcatgtgaaaatctgtatgtttgaagatataaaatgagtgaaaaatttaaagaaatcattttctgtatctgtaaaagtgtatagaggttttttttgtagcaataatatgttttggatgatataattacaaagtgtggatagaaactttttaaggaggtctttatgaagatcaataaggacattgtacgatcgttatctttgataacccagttgggaatcacgattctgacatcggtattcctgtgcatgtttttgggcctttggctggaccggaagttctctacccatttttttatacctttcttgattctgggtgtcggaggaggactaagcggtgcctggaagctcataaggaatgtcagccaagacgaggaggataacgatgatgaaagaacttaaagagatcaatcctatccttttagaattgctggccggactagggatttacggtgcagcggccggtgcggccggcatggtcacatcgggaggttctgtatactttctcggaggaatcctaacaggtctgtttcttgcggcctgtctggttcttaatatgtatctgaccattgacactgcgctggatctggatcctgaatctgcaaataagtatatggtgcggcggacactggtccgcaaattcctgaccgtccttgtggcagcggcggggatcaggatccatatgctgacgttttctggaatcatactaggagttttggggatcaagattgcggcatatctgcagccgatgatccacagccggatatcgggaggaaaatccggcagcagtaatgaagtaaaaaggagaatctattaaaaaggagggtatgctatgggaatgattcaggcccccatgttggctgccgcatcgggcaatgatgtggacttcatggtacacgggctgataccattgaattttttcgggcataaggtatggatcaccaccactcatgttacaacactgatcgttatgatctttatcatggtccttgctttgattgcaaggcgaagtatcatgaaagattacgagaagcccagcggccttgcaaatgccgtggagatggtggtagagatgctggataagcttgtaaagagcaccatgggaaaacactggaagccgtttgccaactatatcggcagcatcatgttctttatctttatcgccaacacatccgggctgttcgggcttcgggcgccgacagcggactatgggaccaccttatcccttgcgctgatcacatttgtaatgatccagtacagcgcatttaagacgagaaagttccgcatgtttacggatctgtttcagccgatcccagtgctgtttccggtgaatgtcatcggggaatttgcgacgccggtttcactgtcgcttcgtctgttcggaaacatcatggcgggaaccatcatgctttcgctgtggtacggcctgcttcctatttttgcgaagctgggactaccggcatttctgcatgtatattttgacttgttttccggagccatccagacctttgtgtttgccatgctgactatgacatttatcgctgataagagaaatgcatagaccggagagaactaacaggagtaatagaaaagaataattttatttttaggaggattttcttatgaatatttcaagtgaagcatttgtattaggttgttcagcaatcggagcaggccttgcgctgatcgcaggtatcgggcctggtgtaggacagggttacgcagcgggacagggtgccgcagccgtgggacgtaatcccggagcaaagggagatatcatgtccaccatgcttcttggacaggcagttgccgagacaacaggtctttacggtctggttatcggtctgattctgttatacgcaaacccattattcgctaaattataatccggaggacgaaagccggccagatgtgaccggcagcacatgacaaaccggagaatttagggaaaggaggacaggacgtggacagaatctttggacttgatatccagcttggatttgatgtattgtgccaggcgatcgcagtctttattatgtttacttttttatcctatgtattgtttgagccggtcagaaagcttttaaatgaccgtaagaaaaagattgcagacgatctggatacagcggcggcagataaagaagaagcagccagattaaaagctgaatatgaagaaaagatcagggagatagaaaaagaagccgatgagattttaagccgggccagaaagaaagccctgaaaagggaagaggagatcgtttcggatgccagacaggaagcggcaaggatcacagagcgggcagaaaatgagatcgcgctggaaaagaaaaaggtccgggatcaggtgaaacaggagatgatccaggtggcagtggctatggcaggaaagatcatcacagaaaaaatcgatccggctaagcaggatgcccttgtggaagagaccttaaaggagatgggtgatcagacatggcgaagctagtcagcaaaacatatggagatgcctatctcaccctggcagaggaaaggaaaacccttgacactgtcatggaggaagtcctggctgtacgccgggtatttttggagagcggggagttaaaccagatgctttcccatccaaagatcgtaaaagaggaaaaaatgcggatactggagacagcattcaaaggcaggatttccgaggatatgatgggctttttgttggtcattgtgaaaaaggaccgataccgtgacataatgccgattctggactatatcatcagccagatgaagaagaaagagggcatagggagccttaaggttgcctccgctttcagtctgtccgaaggacagaaggcagacattgtgtctcgtatgaaagaactgacagattataaggaatttgaagtggattatgaggtggatgagagtctgatcggagggctggtacttcgtcttgaggacagagtcatcgacagctccatcaaaacaaagcttcagaccatgggaaaaagtctgtcaaaaatacagttgtgattataggcaaggaggcaagaaagcaaaatgaatttaaggccagaagagattagttctgtcattaaagagcagatcaaacaatactctaccaagcttgaaacctctgatattggaaccgtgattcaggtagccgacggaattgcaaggatccatggcctggatgaggccatgcagggagaacttttagaattcccgggggaagtatacggaatggtactgaacctggaagaagacaacgtcggagccgtactgctgggagaccagacaaacatcagtgagggtgatgtcgtaaaaactaccggaagagtcgtggaagtgccggtgggtgacgcgatgaccggacgagttgtgaattccctgggacagcccatcgatggcaagggtccgatcgagtcggataagtaccgtccaatagaaagagtagcatcaggagttatctcaagaaaatccgtagatactccgcttcagacaggaatcaaagcgatcgacgccatggtgccgatcggacgcgggcagagggagctgatcatcggtgaccggcagaccggtaagactgccatcgcgcttgacacgatcatcaatcagaagggtgagggagttcattgtatctatgtggcaatcggacagaagtcctcaaccgttgcaaatatcgtaaagacattagaagaacacggagccatggattacactacagttgtggcatccacggccagtgagctggctccgctccagtatatcgccccatatgcaggatgtgccattggggaagaatggatggaaaacggggaggatgttcttgtcatctatgatgacctgagcaaacatgccaccgcataccgtaccctgtccctgctgcttaggagaccgccgggaagagaggcttatccgggagatgtcttttatctccactccaggcttctggagcgtgcggcaaagctttcagatgaattgggaggcggttccttgacggccctgccgctcatcgagacacaggcgggggacgtttcagcgtatatccctaccaatgtcatctctatcactgacggacagatttatctggagactgagatgtttaatgcagggttccgccctgccatcaatgcaggtctctccgtatccagggtcggcggcgcggcacagatcaaggctatgaaaaagatcgcgggaccgatccgtaccgaccttgcacagtaccgggagctggcggcatttgcgcagtttggttcagaactggacgacgacacaaaagagcgtctggcccagggtgagaggatcaaggaagtgctgaagcagcctcagtatcagccgctgccggtggaacagcaggtagtgatcatttatgcagccaccagaaagtatctgctggagatcaaggtagaagatatcttagacttccagaaggaactgtttgagctgatcgataccaaatatcccgatgtttttcggtcgatccgggagaccaaggagcttggaaaggaagcggaagaacagctgatcactgcgatcaaagagtgcaggcagcagtttgaagcaaagtaaagaggtgagcttttatggcatcaattgttgatataaaaagaagaaaagccagcatagaaagcaccggacagattacaaaggcgatgaagcttgtctccactgtaaagcttcaacgggcaagggcaagggccgaagagtccaggacatattttgacaagatgtaccagacggtatcctcgatcttagcccagtctgacaatatcgaccatccctatttgaaggccaacggatcagagaagaaggcggtgatcgccatatcttccaaccgggggctggccggaggttataataacaatatcgtaaagatgatccgggacagcgggatctccaaagaggatgcggtgatctacggtgtggggcacaaggctatggacagcctcgcaaaccggggctaccatatcgcttccgacgactctgatatgattgacgaaccggagtatgaggacgctgtcgatcttggaaaccgggtgctcaaagcttttgaggacggtgagatcggagagatctatctggcatatacgaattttaaaaataccgtggtccatgagccgaccatgatcaagctgctccctgtggagatcgacccagagaaaaaggacggagaggattccaaaactctcatgaattatgagccggaaccggaggaggcattatccatgctgattccaaagtacgtctgcagtttgatcttcggtgcgctcgtcacatcggttgccagcgagaacggcgccaggatgcaggccatggattcagcaacgaccaacgccgaagaattaatcgacaacctgagccttgcctataacagggcaagacagggcgccatcacgcaggaattgacagaaatcatttcaggggcagaggcgctggaatagaagtaggaggaattattaaatggcagataatcatacagggaagatcacccagattattggtgcggttttagatatcaagttcagtgacgggcatctgccggagatcaatgacgccattgatattaagacgaagcagggagagaagctggttgtagaggtttcccagcatctgggagatgacaccgtaagatgtattgcgatgggacccacagacggtctggtgagagggatggaggctgtctgcacaggcgggccgatctctgtgcctgtaggcgaacagaccctgggaagaatgtttaatgtccttggagacccgattgacaataaaccggctccggaaaatgccaagaggctgccgatccacagaaaggcacctgcattcaaggaccagtccacagagaccgaagtcctggagacaggaatcaaggtggtggatcttttatgcccgtatcagaagggtggaaagatcggtctgttcggcggcgccggagtaggaaagactgtactgatccaggaactgatccgtaatatcgccacagagcacggcggatattctgtatttactggagttggagagcggaccagggaaggcaatgatttatattatgaaatgagcgattcaggggttatcgataagacggccatggtgttcggccagatgaatgaaccccctggagcacgtatgcgtgtgggacttaccggccttaccatcgctgagaatttccgtgatgagggcggtaaggatgtgctgttgttcatcgacaacattttccgtttcacgcaggcgggatctgaggtgtcagcgcttctcggacgtatgccaagtgcggttggataccagccgacccttcagacagagatgggtgctcttcaggagcggatcacatccacgaaagatggttccatcacatctgtacaggctgtctatgtgccggccgatgacttgaccgacccggcgcctgctacgacctttgcgcatctggacgccaccactgtactatcccgtgccatcgtggaacagggtatttatccggcggtggatcctctggaatccacatccaggatcctggatccaaagatcgtgggcgaggagcactaccaggtagccagaggggtgcaggagattcttcagagatataaagaacttcaggatattatcgcgatccttggtatggacgagctttctgatgaggagaagctcatcgttgaccgtgccagaaagattcagagattcctgtcccagccgttctttgttgcagaacagtttactggtacggttggaaaatatgtaactttaaacgacacgattcagggcttcaaggaaatcttagacggcaaacatgatgacattcctgagggaatgttcctgaatgcgggaagtattgatgaggtcgtggaacgtgcgaacgcaaagtaggcaggtgatccaatggctgagaatctgatgaaattagaagtgacgaccccggaccgttccttttatacgggagaggtccgcatggctgagtttacgaccacagaagggaatgtggggatttaccctaaacatatcccgatgacgatgatcgtagctccgggaatccttaccatcacagaggcagacggcactaaaaagcaggctgctttgatgaagggatttgtggagatcaccaaagaggcggtgaatattctggcagaggttgcagaatggccgggagagatcgatgtggagcggatggagcgtgccaagaggcgtgcgcaagaacgtctaaaacacaagaatgacagcgatcttcaccgggcggagatgtctcttaggagagctttggtcagagaagaattgtcaaagaagaattaaataaatttatatcaaaatacaccggaagcagtgaaataaaaactgtttccggtgtattttaccttgtatcagcagacattctgtccttttgttagaaaggaaacagatgaaccgtgttccagagaattgcaacgatgatggatagccctgtaatttgagcaagctgtttaggatttttgcaaaatatacagattgccatgaaccagagaatcgcttccagcccttggttgctgacgttaaaatatgtgagatcaaaattaaacgcctgtgtaaataggatgccgataatgccggacgataacataagggaagtgattcccgtgcctttggcataccagcataacacagccaaaatcggcgagcaaacagtcagtctgacccaaatcatgatataatctacaggaaaaaaaccagcgataaagtttgtataggcataatagcttatcagcattcctgtaaaaaagagaaaagtgcggactcctgcccagacaggggtctcgctgtaaacagagatcagcaatgcaagaaacagccagataggaaatcttcctaaaaagtttctgatatccagtagttcaaatacatagggcaattcgttggaaggagagcagtccaggaatttagaaaaaatgcccattatgagaccaaatagaaagaccccaaatgttgtgaataacaatttgcggattggaatattttgaaccggtggtcggatatgatttaaaaattctttcacatttacctctcaggatacggctcagcggttagccagattattattctggtaccttggatccaaagtcacttcgtcttcaaaccagtcaggtccttcataatcaagcgctgcctcctccgatgggaattctacttccgccatcatcaagccttcgtggtcgtcatggaatacatccagttcgatgaccagggagtccgacgttgggatctggtagcgtgtcttgtatatgaggatcccgtcaatcttttcttttaggtgttcataggcctgctttgtcagaggaaattcatgttcagcccgtttcatcagccctttggacttataagtaaggatgtattcgtggtcaagtctgcggatccggatgaccggttccatgcacagataaccctgttcgatctcagaatgaggataggaatcaaggtcttttggcgggtcgctaacgataaacttgcgttcaatttccatagtggggtcctcctttttcctcattatatacgcaacaaagacagaatgcaaaggaaattgacaaccagacggaaagcttttaaaatgtgttagaagaatgaatacagagaaggcgaggaaattagaatgcgtttaagaaatgtgccgggagcggcagacatgatagcggccagcccattttcagtctgtgagccagaagagtggaaaggcagatggagggagatgttcggcaatgaccgcccgattcatatagagatcggtatgggaaaagggaagtttcttttgacactggcccataaacatccggagatcaattatatagggatcgagaaattttccagtgttctggtgagagcagtggaaaagacagaagaattcgagggggataacttgaggttgatccgtatggatgcagaaaatctggaggaagtatttgaggagggagaggtcagccggatctatctgaacttttccgatccgtggcccaaagagcgtcatgccaagagaaggctcacgtccacgaggttttatgagcggtatgaccatatcttagcaaaggatgggcaggttatttttaaaacggacaacaggggactgtttgacttttccctggagcagacagaggaagctggctggaagcttttaaatcacacctttgacctgcacaacagtgagtatgcgaaagagaatgttatgacagaatatgaaactagattttccaaagagggcaagccgatctgccgcctggtggcttaccgttaatatttttaccaatgttgcatactataataaaaaagtggtaagataattatgaaacagaaaaagtgtcaagtaaaggtaaatcaatttttctaccagcatccgaagtccaggaaatggttttgccgcctggtagcttcgctggaggaagcgaaagattgtttatgccggtcaaggtaaggagaagtattatggagtatacgtttacgaaagaaaatttccaggcagaagtgttagactcagatcagccggtacttgtcgatatgtttgcaacatggtgcggaccgtgcaggatgatgggaccggtagtggaagaactggcagaagagtacaaagacagcattaaagtcggaaagctggatattgatgagaacagtgatatcgcagcgcagtacggcgtcatgtcagtgcctacctttctggtatttaaggacggacaggtggcagcgaaggttgtgggagctgttcctaaagaagaattgatggcggcagtagataaagccaggtaattttgttcccatatcagagataaaaaacggacggcagaagaatctgctgtccattttttatgcctcataatgggtcctgtcagttgtcttagtattctgcttattacgcaatgataactctcgttagcgcttttgtacttctgtttgacaacggagaggacagcaattaaactaaaaagcagagaatgataaagaaaaggtggacacatgaatatattaaatatagaacatgtaagtaagatttttggagacaagaccatatttgacgacatctcactcggggtgcaccagggggacaagatcgggatcctgggagtcaatggaacgggaaagtcgactctgttaaaggtgattgcgggactggagcttccagacgagggagaagttatattcggaagggggatacgaacagcattccttccccagaatcctgagtttcctgagggagccaaggtgctttcctacgtgacggaagggaaacaggatgcggacggcggggagcccgtgagcgaagccaagaccattcttaccaagctgggtatttttgattttgaggaatctgtaagccatctttcaggtggacagaaaaaaagagtggcgcttgcaagaactctggtggatccggccgaggtgctgatcctggacgagcccaccaaccatattgataacgatatggccctgtggctggaagattatttgaacagatttaagggagtcttgatcatggtgacccatgaccggtattttctggaccgtgtcaccaacaagatcgtagagatcgatcagggcaaactgtatacctatgactctaattactcaggattcctggctttgaaggcacagagggaagagatggaactcgccaccgaacgcaaacgccagagtgtgctgcgcacagagctggaatgggtgaagcggggccctcagggaagagggaccaagcagagagcgaggctttcccgctatgagcagctaaaagatatggagggtcctaaggaagcgcagaatgttgcgatggattctgtcggcacaaggctcggcaagaaaaccatcgaactccatcaaatttgtaaggcatacggagaaaaaaggctcatagaagacttcacttacatcattttaagggatgaccggctggggatcatcggcccgaacggatgcggcaagtccaccctgatgaagattatcacagggcgcctggaacctgatgcaggagaggttgtcaccggtgatacggtaaagatcggatatttcgcacaggaaaatgaggacatggatggagatatccgggtgatcgattatatccgcaatgtggcggactatatagaaacttccagcggtaagatcagtgcgtcccagatgctggagagattcttgtttacgccatctatgcagtacacacctctatccaagctttccgggggtgaaaaaagaaggctttatctgctgaaagtattgatggacgcacccaatgtactgatcctggatgagccgaccaatgacctggatattgcaaccttaagagttctggaggattatctggattccttccaaggcatagtgatcgctgtttcccacgaccgctactttctggaccggattgcggagaggatctttgcctttgaggatggaggcagactgacccagtatgaggggggatattctgattatctgagagccagaagccctgaggagccaaagaaaacaaaagagaagacagagaaaaaatcatggaaaccgaagaatacgaaactgaaattctcctatcatgagcagagagaatatgacacgattgatgaggatattgaaaagctggaagaaaagatatcagaggtggagcagctaatggaggagaattccagccagtatacaaagcttgcagacttgacagcccaaaaagaggaattggaacaacagctgaatgaaaaaatggaacggtgggtctatttaaacgacttagcggaaagaattgaagcccaaaattcctgagaggtggagatcaatgaaaaagagattcggaaaacggaggagaccaggtgctgcctgtgcggtccttttatgtttgttgcttgctggaagcgtgctcggctgccacaaggagaagtccttagagacagagaaccccaaatacgtcatcggtatcgtaaccaagtccagggacagcgaatactggatgtctgtgtgttccggcatggaaaaggctgccgcagatcttggcgtgtcggtcattattatgtcgcctgacacggagacggatgaaaaagcacagcagcagatgatcgacagcctgctgaaaaaagacattgacgcattggcagtgtcgcctatcgattcttataatgcaaaagaatatttaaagaaggcagaaaagaagcatatcacggtggtttcctatgacaccaaaattatggaaaagggagtcccgtacattggcatcgacaacgaaaaggcaggcagggatttggcagagtatctggcagggcagatggaagaaaaagggtcagtgggcattatctcaggaaatctgaaacagagttcccacgcagccaggctcaaaggatttaaagactacatagaaaggaacacacatatccaaatagcctttacagaaagcgggtacagcaatcagaggatgtcagagcaggagatctcaagactcatgaaggagcatccggacttaaacgggatctttgccaccagtgctgttacagctctgggtattatggagtatctggaggatcagccggtactgattgccaccgtagatgcacaggaggacgcattggatgccgtcaaaaagggaaggatcgctgccctggcctaccaaccaggttatgagatcggttatgagactatccggtatattgtgaatgaaaaaaagggaatcaaacagccagtgcagaagattatcaaggcagatctaaaaataaaacccaaaaactaaaaaaagtacattgagaaagggatcctcaggcaacggaggatctcttttttcagcgtgcacaggataagctgcccggcttataaaaaataagaatcaaatctaaaaaaatccatagatacactccccagttctgaaaggtaaaatagcactgaaggcagggataagtttatctgccgtacaggactaacaagattgatcagaaaaggagaacttaccatgaacaaagtaagagtaggtattgctggtttaggaagattagggaaattacatgcagagaatatcgcattcaagattccaaacgcggaacttacagcggcctgttcgatcgcgccagaggaattggaatatgccacagaacatttcggggtaaccgatgtttatacagatttttatgagatgttagataaagcagacattgatgtcgtggcggtggtgaccacgagcggagaacactgctggcagatcaaagcagcattggacgctggaaaacatgttttttgcgataaacctctcggggttacggtcaatgaatgtaaaacagcggaggccgcggtggaacgccacccagagcttacattttttcttggatttatgcgccgttatgacccatcctacgcttatgcgaaaaagaaaatccaggagggagccattggtaagccgtatatggtaaaagcggcagggatcgacccggaagctctggtggagggagcagtaaaatttgcagccaccagcggcggtatttttatcgacatggcaatccatgatatcgatttaatgcgctggcttttggaatccgatccggtggaagtctacgctgcaggggccacgtttaaacatcccgaattcagggaggcaggggatgacgagacgggggcagccatgtacaaatgtgagaacggtgcactgggatttgtacatgttgggcgtacagcggcccatggatatcatgtggagacagagatcatcggaacagagggaagcctgagaatcagtcctgtaccggaaaagaacctgtgtatgatctacgatgagaacggagctgtgacagaatgtgtcagcggttttgcagaacggtttgcagaggcatacctgttggaaatgaaggaattcatcaactgtgtccagagcggcacaaagccggatgtgaccgtatatgacggcacaaaatccacacagatcggttttgccacaacagaagcgtggaaaaagggctgtactgcaaagatccagtactagttgacactttttttgtgcaaaggacatgttccacatgatttccgttcggctcttagaatgcctcactccaatcatgtagaacatggacgtagtgtctgctggataaggatgacagttaaacagaaagtgccatcctacgatagtttttcttcattgtcggaaggaggcctttccagagccgactggagacaatggagaaaaactcatacccaggagggcacacggttttttatgcccttagggcttggcgtgctttgcacgataaggtatgacatgttccacatgatttccgttcggctcttagaatgcctcactccaatcatgtagaaaatggacgtaatatctgctggagaaaggcttctgttaaaagaagggtgacacttttcaaaagttatttaccactattggaggagcgcatttcaaaagcgcgacggaaatagtggtaaataactcattcccacagggcacaccgtattttatacccttcgggtggacgtgctttgcacgataaggtataatttaaatatagaaaaaattgtttatgtaaagtatggaaaatagatatttttcaagctttaccgttagcctgaactgacattggcatgtcggctcaggctagcggaggatatctgggcagggagaggaggcagggcatgatacacagtatgcggagtaaagtattcttagcgattatcagcatcacgcttttgaccgcatcagcgatcactctggtgttctacctgaagtctacccagatgatcgaagacaattatggacagaacctatacggtcgtatagaacaggtaggaaatgcatttgatgatgccatgaaggagatctattacatcacgctccagacctctgatgacgatgaacttgtgagccaggcagagagttattcccgaacaaagaaggtggggagactggaaaagatgtcatccatcctgggcaggtttaaaaaacggaacagtgatatcggttccgtgtatctggtgatgccggggcagaagaccattgtaacgtcagaagactatcctatttacgataaaaaggtaaagcggtccatccttaagagtgtggaggaggttgcccaaaaggatcatccggtgattataacggatccggtaagaaaccagaaaaaagtattgtcttttattgaaccgctcacgtcagatgaaggaaggaccatcggctatgttatgtgcaatatcgaggagcgggccatctattataaataccttgatatcctaaacgacggcaaatcctccgaggcagtactgctgaacagggagaatgccattgtctccacaaagaatgcggagtccatggggaaattatataaaaacagcgatttcccgaatgtccagcaaaacggtattgtcaacaagagatatcctgcagtcatagggatcagttataagacggtgttcaccggatgcagtttctttatcactgtggaaaaaagcgtggtgttaagcgacctgaatcagcttaagtattttctattggcatttttattcctgtttcttgggatctccatgattcctacttattttgctaccagagccatgtatgaaccgttaaggaacctgacggaggccatggatgaggtcagcgggggagagctggataagcgggtggaagtgcacacaaacgatgagatcggcagactctccaacgacttcaataacatgctgaaccagattgaaaagctcattgagcgcctgatcaaagaagaggggcttaaaaaggatgcggaactggaagcgctccagtaccagattaccccgcactttatgtacaatacattaaactccataaagtttgcagctctgctgaagggcgaaaaggagcttgggaatctgatcggagattttgtggagcttctgcaggccagcgtcaacaaaaaagggacctttgttacggtttctgatgagctgcatatcctgaacaattatatccatctgcagaagattcggtatgacgggcattttgatgtggagtatgagattgacgagaaggcaggaagctgttttgtaccccgtctgatcctgcagccgctggtggagaactccatccttcacgggcttgatatgaaaaaagataacagccggattgagattaaagctatgattgaggaggaatatctctgtatcagtgtcaaagataacggacggggtatgacccaggaacagatttacgatttactgacaaagaagacgaaaaaaacaaatgggctcagcgggatcggggtagccaatgtccgcgagagactggagctgtattacggaaataatgccggccttggatatgacagcaattctgacggaacttcggcatatctttaccttccggcttacaaagagcagaatctgtatgcagtgtgaaaggagaaacgccatgtaccgaacgatcattgtagatgacgattttttagtgcggagctatttaaaacagctggatgcctgggagaaagcaggctatgagatcaccgcggatctccgggacggcgaggaggccctgggtatgatcaaggagcagccgccggatgttatcgtaaccgatatctccatgcctctgatggatggaatcgatctgatacggaaggtgcgggagatgggcctgtctacatatattatcgttctgagctgccatgatgattttaattatgtgaaagaggccatgcggctgggagccaatgaatatgtgctaaaaaattctttagatgaggattctctttttgaggtactgaaaaatgcggagcaccatatggacagcatgaaaaagcagaacacggatgaggagcggacaaagaagctcatcagagccggaagccagtccttaaaaatccggttttttaacgagatcctggctggggacatgagtcttaaggagagggaggaaaggcggaaggaagccggcattaaaggaaaatacatgaacagcgctgttgtaaatatgttcataccagggtggatgggtattaaggacggccagtctccggcggagacagagcagtatgcggcgggatttatcgagcggctttccaaacagctggaaatgctcctgggggaagagagctgcaaggcagagacgatctctctgggcggaggaatcttctgttgttttttggatctttcggatctaagcaggagcagtgtgatgaagcagaagctcaccagtgtggcctctgcctgtttccagtgctgtaaggaagaaccctatgactatgacatcggggtcagcaacatctgcatcggtgagggcgggatccgccaggcgtaccagcaggcaagggagacgatcaagctgagtttttatgaggacagtgatattctgtattttgacagccagaaggctatcggcacaaagatgccagattgtgcccaggagcttctaagccatgcgagggaatatgccgcgggacgcagggaaaaggagatgaaggcggaattcggacaggtcatagacatgtgccgggagctgaggacagatcccaagatcatcttccggtggatccgcaggctggacacggcggtaggaacggaacacagccaggaagagctgtttaagctgacccatgtggagcagcttaaacagatatttgaggactacagaaaaaagatcttcctgggagtgggtaaagaggtgccggaaagcgctggaacgcagatcagacaggctgtccagtatatcagggagcattttaaggagcagatagggctccaggaggtggcagatgcagtaggccttaattttgcctacctgagttatctgtttaagcaggagatggggatagggttttctggtttccttctggaactacgggtggaatatgcaaaggacctgctgaaaaataccagctacaagatcaaggacgtggctttggaatcgggatttaacgattatcactatttttcaaaggcatttaaacggctcaatggtatcagtccggcagagtaccgcaggaggtcctaaaaataagacacaaaatcgggaatatctatttttagtacaacaaagctaaaaatattcccgatttttttgatcctctaccgtggtatcctttattcagatcaaaaaagaacacggataaaggagaagtgctatgtttaacaaagaaaaagtaaaattaggaattgccccgatcgcttggaccaacgatgatcttccggatcttggaaaagaaaacacctttgagcagtgtgtcagtgaaatggcattggcagggtacactggttccgaagtaggaaataaatatccaaaggacccagaggttctaaaaaaggccctgaaactccggggaatggagatctgcaatcagtggttctcatcatttttgatcacaaagccatttgaagaggtggaaaaagagttccgcgctcaactgagtttcttaaaggctgtgggagcaaagatcattggtgcttctgaacagagccacagtgtacagggtatgctggatactccgatctttggacataagtatgtgatgaatgacgaagagtgggaaaccttctgtacgggaatgaataagttaggaaaaatcgcaaaagaagaatacggcatcagcttaaccttccaccatcatatgggaactgtggtacaggacccggatgaagtggaaagaatgatggcaaacacagatcctgaatatgtgaatctgttatttgatacagggcattttacatactgcggggcagatcctcttgaaatggtgaaaaaatatgtggaccgcatcaaacatgtccatcttaaggatatccgtccggaaatcgtagaaaaagtgaaagcagaaaacttaagcttcttagatggtgtgcgtatgggggcgtttacggtaccgggtgacggatgtattgattttgatccgatctttaaggtgcttgaagattcaggatatgaaggatatatgctggtagaggcagaacaggatccggccaaggcaaatccgcttgaatatgccatgaaggcaagaaaattcatcgctgagaaaactggattataagaataatgatatagaatagacaaaatgctgttggaggaacgaaaagttcttctgacagcattttctgcccagagaacctataatatggggtaactatgtggcgatagaaaatagaaaattcatttgttacaaacaaaagaccccgcatgcctgcggggtctttaatgaaaagagaggattaaaatatatatgaaaaactatgtcttaagtatatcagttttatatccgaatacaatgtatagaaactaaacaattctaaacatcctataaacaaacattaagaaagtcttgtgtttcttatggaaggatagggtggctttttatatagtcctccataatgtaagcggcacagccgacgatctgggcacagggacgcttcttataataatcttttgtgcgttcctcagggacgtaggtttcctttttctgctccaggcccagcagttcgcggcagacgatggagccgtttacatcttcaaatgagcgggcaagttcctggatgtgcctgtaatgctctgtcttggcttggcggtcagtgggggaatcgtatccgtacaggataccggcagcaagaaacataccgctgacggatccgcagacctcccggagtcttcccatacctccgccgaaagaagaactcaatctcagtgcggtcttcctgtccatatcatagaggtcctggaaggccagaaatacagactgggaacagttgtagccttctttaaataaatccatggccttttgggcatattgactggaagtgagatcaatgttcatatgtggctccttttcttttgcgtgttgcggaaacggttttatcaaataaaaatataaacaaaaaacaccatccccagccccaaacaagccaaaaatagtgttttaatacgcgatgaggggctcgaaccctcgacaccctgattaagagtcaggtgctctaccaactgagctaatcacgcttatttctttgtgcgctgctttttcaacgcaaggattattatatatgatgtttttgataattgcaagtgaaaaatgaaaatttttttgtatttttttgtcggccgttaaaagaagccgatattttaatctgattaagaggaaaagaagaagagcaaaagcccctggaccctatacttttccgcatctttgtgctagaataaacccaaaatttgattgtgccctgggatagaagaaggagtgtaaaatttgaaaaataataaatttgaatccaataaaaagtactttaccatatcgatttattcgatcgtcgtgatcttgatcggatgtattattttccgtctggtgaataattgggcatcgaccatcggtatcctgacagatctgtgggatacgatctttccgttttttattggctttctgattgcatacgttatgaatccggttgtgggtttctttaatgagaaagtatttgtaacattattcggtgaaaagagaaagaagattaatcgggcagcggcgattcttactacctacattatattagtaggggcactcaccatctgtctgatcttcattgttcctcagctctatgacagtatcaaagagttgtccaatcagatcccggtgatctctgataagatcatggggatgctggatcactacaaggagagcggttccggactgatgcctcctgaattgatggacacacttgagaccaaaagcctgccgaagcttgtgcagctgtccaaccagatgctgacggatgcgattccaatgctctataatttttcaatatcatttgtgaagtggttatttaatttgtttatcgcttttgtggtctccatctatatgacagcagataagcagattttaaaaagctcctgccgcagaatcattttcgctgtttttccgtatgatgcagctgtgccggttatccacggactgaaagagtgtcacaacatcttttccggatatatcatcggaaagtcactagactccctgatcatcggatgtctctgtttctttcttatgagcatccttcatcttccctacactgtgctgatcagtgtcatcgttggagtgacgaacatgatcccatatttcggaccgtttatcggagctgttccgggcgcatttatcctgtttatcgtgagtccgtataaagcactgatcttccttgcgatgatcctggttttgcagcagtttgacggactggtactgggaccgaagatcctgggcaattctactggtgtccgcccaatcctgatcctgttttccattacagtgggaggtgcttacttcggacctttggggatgttcctgggagtaccgttttttgcagtggtacagtacttgatcaataattgggtaaactacaggctatacaaaaagaatctgaatatcgattaggaggaaggacatgaatcccgttgttgcaatggtccagtgcagatcctctgcagagccggaggataaccttcagaaagcagaacagttctgccgggaaggatatgaaaataatgtgaagtttacgatctttccagagtactttatgacatattaccctatggacagggcagagtattacaagagagcgcagtctcttgacggaccgtttgtcagagagatgaaaaagctgtctgtaaaatatgcgcaatggattctgtttggaatgaatgagaaaccggagcgggaaagcggcgggaagtgctttaacactgctgttctcatagatgatagtggaactgtgcgttcagtttacaggaaggcccatctgtttgatgcattctcctggagggagtcggaagatacaatgccgggagatgccttgcctgagccggtggatactccgttcggaaagattggtctggggatttgttatgatctgagattcccagagccgtccaggatccagacattaaagggtgccgatatgttagtctacccatcagcatgggtggacggaccggataagtttatgcagtgggagactttgctcagggcgagagctattgagaacggcgtgtttgccatcggttgctgtcactacagcgaagaacactatatgggaagaagccttgcatttgatccttctggtaaaaagatcgcaaaggccggctccggtgaggagcttatcgtgctgacaatcgatacagagaaagcggcacaggtcaaaaagcaggtgccttccttaaaaaaccgacgtacagatctatatgatatttcccagagaaacagtgaaaaatccaagtagtaaaaaggataggagcataaaaattcaaactggaaggagaccgattatatcgagagtatgcagaggaaaaattacctctatgtgagacagagcaggttccagtgccctatgacaatggacgagctcagcgggaagataaaaagatcccgttaagcaaaggaagaatagaaggactgagaaaatattatggcttttagcagctcttttcatgatccatatgtatccatttatcaaatattgattgtatccacccccaaaatacaatagaatgcaaatataacgaggaggtatttacatgaatcaagactgcattacaatggaacacgtgggcattgcatttcaggacaaaaaggcgttgagcgatgtcaatataaaagtatccgagggagaaatctttggatttctaggacccagcggtgctggaaaaacaacgaccatcaagttattgagtgcacagctgacccagtatacaggacagatttctgtcatgggaatggagcccatgaagaatgtcagcgcactgtaccagaatattggaattttatctgacaacagcggtttctatgagaagatgtctgtggaggaaaacttaaagatctttgcggagatctacaggcttccgaaaacgaggattccagaggtgttggaacagctccatcttgccggtgacgaaaagaaaaaggccgaaaagctttcccgcggaatgaaacagcggctgctgtttgccagggctatcctgcacaaacctaaacttctgtttctggacgaaccaacggccaatctggacccgtctacaagtgaagatgtacataatatcatcaaagacctgaacaaaaacggaacgacagtgttcctcaccacacatgacatggaagaagcggatgaactctgcagcagagtggcattcctcaatgaggggagcatcaaagaggtcggtgttcctgaggaattaaagatcaagtatgcaaaagacaaggtgcgggtcctctacggagacggcacggtaaaagagttaccgaaagacaaagaatccatagccagtgaactttcccgtacagacaaagagattgtgaccatccattcagtggaacccgacttaaaaactattttcttagatctgacagggagggaattagcatgaaattaagaggacgaattataaaggcactgatgaaaaaggatttccgtatgctctcaggcaataaaaatgccttctttatccttctccttccgattttgttttgtgtgctttacacaaaggttctgcccatcggagaccaggcgggacagatctaccctctggctctctgtgaagtgctgaatctggtttgtgcgccgatctctctgctcagtatgatggtagcggaagagaaagagaagaatactctccggacattgatcatgtctgatgtgagagccatggagtttctggcaagcaagatgtttgtagtgctccttctgatggaagtggtctctgttgcaaatttcctgatcgtagggatcggcatgaagtattttgcgggatacctgctcatttccactctggcatccatagggatcctgtttctgggagcttctgtcggcatcatgtcagaaaatcagatgtccaccgggacgatctccacgccgttgatgctcttattgatgctgccaccgatgtttgcggggatgaataacgttctggaaaagattgcgttctgtcttccgacaaacgcgtttgttgagatcatgaacagggaatattaccaaaaagcggcattcctctccggaagcaatctgaagtattacgcagtctgtctcgtatggattctgatcggcattgtagtgtttaacattatctataaaaaaagaggcgttgacagccaatagtttataatatatttagaattgtttattttctatatattgttttaagaggaaaagttggtatacttaagacatagtttttcatatatacttaatcctctctttttaaaatgctctgccggttacagagcacatattgtaagcaggttagtgccggaaggaattccggcactgattttttattccataggaaaattctccctatggaataaaaaagacctacgggcgttacgcattttgcgctcatacaggagaagtctttttgttcagcaatgcataaacacaggaatccgtgagttcaccgtttttatagatgctgtcttttttgattccttccagctggaagccgcagtgttccagcacctttctggagcctgtattgcgggcgaagggctctgcatagatgcgcacaatcgaaaatgtctcaaatgcttcacggcagatcctgcttaccgcactgctcatgatcccctgtccccagtagtcttctgccagccagtaccccagctcagcactgtatctgtatacatcgctgccaaggaagatgccgatgctgcccacagcatggccgtctgcacagatagcacggcacagctgtccagagtctttgttttgaatacaggactctacataatctgttgcatccttccgggtgtacggatacggaaaagcatccctcagattagcggcaatctttttattatttgcatggtgggcaatatcctcagcatcctcatactgccatggcctcagctcataatctatcataagtccccctttcactcttctcagcactccacgatcttaatataaaagctccggtttctgggaccgtcaaattcacagaaatagagatcctgccatataccgagcacaggttttccctgtgagatgatgacggtctgtgacggaccaacggtagaacatttcagatgggcgtgggagttcccctccatatgccggtaatggctgtcttgctcaggatagattttgccaaaaccgtagagcatatcgtggactacatcggggtccgcgttttcattgatggtgataccggctgttgtgtgcggggaatggataatggcaatgccgttcttgatcccgcatgccaacaggtcttctctgagataggaggtaatcttgatcatatcctccggccgggtgcgttccaaatgatgttcaaaaaatgtgtgtctcatttcatcactcctttactttgtctctgtgagcttcgctctgttctggaaaagcgtcctacgctgttattttaccagatacactgcttaaaatatacctgtaacaaagcttgcagcttaaagcagcagacagaacataaacgaaagaacgaggtatattgtattttttggtattcctttccgtatattcttgtttcatgacaatatttgtgatattttgaagaagatttaacagttttattacaaaatccttacgaaataaaagttaccggaggaagagagagttgaggaacttaaaaaaatatataacagtctggaccatggcactggctgtgacggcggtatccatgccggtctctgcggcaccgtctatgtctgccggcaccgagatcgtccaggaagataaagtacaggaacaaacataccaggtcagatttgatgcggcgggaggctatgtatccaagtcagtgctccaggcagaggctggggaacgtatacaggagcctgaaacgccgaaaagagacggctacgtattccagggatggagagttcaggataccgcaggccagacgaagttctggaattttgataccgatgaaatgccggagagagatctcaagctgacagctgtgtgggaaaaggaatgcacattggaccgttctcaggttactgtggcagtttctgcacaggcgaaagtagaagtcaaaaatgcctcttcacctaaggttgtgtggagatccggagatgaacgtgtggccgctgtggacagcagcgggaatataaaaggaaaggcagccggaaggacttatgtgcaggctgtagtgggcagccaggtggtgagcgcagatgtacaggtcacaaacccatatctggcccagagcagcggcacagtggctaaaaaaaggacttccagaataccgatcaagggactgagtgcagacagcaaggtgtccgtaacggtgaacagaagcagggcaaatgcctatatccagaacggacagctggtcatatatccaaaaaaacaggggacgaccaagttttacgtcacagcagacggtaaacagaaaacttataaggctgcggtcacctcttatcaggcggtaaaagccatcgcaaaggcaaagaaagcaaagggatgccgttacagccaggcaagaagaatgagaaggggttactatgactgcagttctttgatctggcggtgttataaaccatacggcgtacatttcggaagccgttcctacgcaccggttgcagccagtgaagccaagtacatgaagcggcacaaaaaagtgatctcttataagaggctaaaggccagcaagcttctcccgggagatgtgatcttttactcttacacaagaaatggaagataccgtaacatttcccacgtggcgctgtacataggcaacggaaggatcatccatgcggccaacagcagagtgggtgtcatcgaggcaaattataaatataccaggtgcatcaagatgatcgcgcgtccggttaaataaattttaagaaaagaatcggctttccctaaggaaggctggttctttttgtgttatactgaaaccaaataaggttttggggagggacgctacatgaagaaaacattgtccaacatacttttggctgtgtgtattgtagtatttttattcagcggctggaaacttataggatattttctggaatataaaaaagcagacgacgaatatgataagatagcgcaggaagcagtcaagacaaaaggaaaagaaagagtcattgattttaataagctgttaaagataaatccggatacgattggctgggtctatgcaaaggagaccaagattgattatccggttgtcctcggcaaagacaatgactattatctgcatacaacgtttgagggcacaaaaaacagttcgggggctgtttttatggactgcaatggggataaggattttaactcagaacataatatcatttacggccaccatatgagaaacgggtcgatgttcgcggatcttatggaattccgggagcagagcttcatcaacaagcaggataccattacactctatactccgaaagggaaaaaggacctcaaagtcatttcatcctatgccagaaaagcagacaaaaagatcccgatcaccttcggagacagaaaagatatgaaggagtatctggagcagatcctgacacagagtgatatccagtccaaaataccaaaaaagatggtcatgaagacaaaaaaactttatacatttgtcacatgcagctatgaacaagacgataaccgtacatttgtgcacgcaattgagagcaaagattaacgaggacttatatgttcaaattttctaagaaaaataaaaaggaacttgcagtcatctgcacgtttctttttattgtcacttttatttttatctggattatccagaccatcggttttccgattaagacgaaggtggaaaacggccacatcaaggtgattgatgtgtcaaagtataacaaaaaagtcaactggaagaaggtcaaggaccagcagatcaaccacgctgtgttaaagattggttctggacttgcagaaaagaagaagaaaacagaggatcctatgttcggtaccaactaccgcaatgccagactatcctccatccactgtggagtttattactactcctatgcaaaagacgtgaagtccgcaaaacaggaagcaaagcattgtctttcgctgttaaaaaagtatgatattgacccctcggacctgaagcttcccgtagtctatgacgtagaggaagaaagtatcatgaaaacgggaaagaaaaatgtgacagccctgacaagggccttctgcgaagagatcaaaaaagccggctatgagcctatggtctactccaacgcctattttctgaatcagtattttgactatgaaggaatcaaggactataagctgtgggtggcccactatacaaaaaaagaacagccagatatttcgtaccagtatcatatgtggcagtttacggaccaggcttccatagacggggccaacacggaaagcggccactgcgatctgaattattatctggtagataaggaagggaatctgttatgagagaaataaagaatgcagcgctcatcggccttggggccatcggaggtttcgcagcgccaaaactttgtgaagcactgggaaaagaacattttaaagtcattgcagggggagaacgcagggagcgcctggaaagagacggcatcgtcatcaacggaaagcagtggaagtttcagactgcggacccatcatggacgatggagcctgtggattttgtcatcctgagcgtaaagtttacagccctagatcaagcgattgaagatatccataacatagtaggcagagatactgtgatcatgtcccttctaaatggagtggaaagtgaagagcggatcaaagcggcttatccagacaacgaagtgctttactccgtgatccgcatcccagctcttcatcagggaaatgaaattacgtttccggaaggttcgggcaaaatctcgtttggaaacgcaaataacgatacattgtcagaaacggtgatggctgtcagggatttatttgaaaaatcagggatatcatatgagattccgaaggatatgctcaagaacatgtggcataaatttatgaccaatgtcagtgagaaccaaagcgctgccatcctgcgcgtgccctatggcatctggacgttcagcgaggatgccaatgaattgagggaacaggctgccagggaagttatcgctatcgcttccaaaaaggggatcaatctgacagaggaggaccttatagaacacagaacttactttgaaggggctccgttttacgggaaaccttccacgctgcaggatattgaggcgggaagaaaaaccgaggtagagatgtttgcgggatctgtcataaaaatgggaaaggagctgggaatcccaactccttataaccatatgttttatcactgtattaagactctggagacatggaatgaacatcaggcccgtcacaagtaagaggacgcatgagatgcaatctccaataaaaccgcatagccgaaactgatgatcaaagccgcatagtaggatatactggcggctttttcatttggccagcttctcctggtatctttgtccagccatgttctcaaatatccggaacgcttggaaatgcgtccgatggcgattaagatcagggcgctgagcaccagaaagccgatgctcacaggaatcaggatcacaatgctctggatcctctgggccgtagtcagagtctggtcaagtaaagccgagtgcccggtcagcccatagatgatgctcataatgacgctgaagccgttaaatgtagcgtgaaggagcatacaggaataaatgctgccggatgcctcaagaagcagccccagcacaagtcccagagcaaaggcatagctgaactgattaaagttcatgtgtgcaatgccgaaaaacagtgccgtcagaaaaattcccttaatagggcgggcctttctcaaaccggaatagataacgcctctgaacaggacttcctccacgactcccgggaggattgacagtgctaggatggaaagccatggatgctgtgcggacgtggtgataccggatgagacaaagtcgcggaaaaacagctggcttaggttgttgatcaggctgatggccggaaggatcgtaaatcccagcaggaccgtcagcagcgcggcgctgggcttcagaggttttaagcggaggcgtgttttaatatcctctctgcacagtttcagatagcctgccgccagcaaaagaaccagcaggtaaaagacgatcatgaacaggtagcggtcctgaagggcaaactgcagcagtggggagataaaaaagtaaacaaacagatacatcaggcagaaacagccaggtgacttaaaatacttcatagatcgatggctccttgtcagcttattttgtgcggattgttccgttcttgatctctatcttatcctgctttaacagacggcctacagcgcgtttgaatgcgttcttgctgagccccaattccctgtcgatgacatccggagacgctttatccgtaaacggcaggatgccgtcatagcttttgattgtctccatgaccagctggctgtctgtatccatctgcagataagccttgttccttggggaaaggtccagcttaccatcctcccgcacccggatgacacggacgttgacggtatctcctacagagagcttcgtgtgcagttcattgagtgggatcagtccgaaatactggtcatctacagcgacgaaggtaccgatctcaggattgatgctgtacacagttccggagacccagtcatccttttcatagtcatgttcactgctcagggcctggtaaatcttcatggatgcacacagccgtttgcttttatcaatataaagccgtaccagataggaatggtccggtcttactttggaggtctgttccttaaaggggaggaataagtccttctcaagcccccagtctaaaaaggcaccgatgtcagtgacctcttttacggtgagcaccgccagatgccctatggtgatcaacggatgggatgtggtggcaattggacggtccttggagtccttgtagacgaacacagacaggcagtctcctatagcggcgtcttccggcacttgctttttggggagtaggatgctctgttcagtcactcctttctggtcatttagatatgcgccgaaatcggcaaattttacaatataaagttcttggttttctcctaatttaatcatagttcttcctttctttgttttcctattatagcataaataacttttcatttgcagaaaatgtgatactataataagaaaacggagggtgaagcagtatgcaggaaaaagagcggtattcaatagaagatttcatccaggtggtggaggaactccggggagaaaatgggtgtccctgggataaaaaacagacccacgaatccctgatcccatgtcttgtggaagagagcggtgaagtggtggaagccattgagaaaaaggacatgctgaatctggaggaggagcttggggatgtgctgcttcaggtggtgatgcatgcaaggattgctgaggagcacggagattttgatttctccgatgtggtggacggagtgtgtaaaaaaatgatccggcgccatccacatgtgtttggagatgcaacttttgagagcagggaggaacaattatccagctggaggaagattaaggaattagaaaagatagaaaagaagcgcaaagcccgtgaattggctgaaaataaggaataaagagcattttggcttgacatgctgtcaccttaattatacaatgaattcatgtaatcgaagagcagaaaattgcttatgacgaaattaggaggaatataatcaatgaacaaaacagaattagttgcggcaatcgcaagcaagactgaattatctaaaaaagatgcagaaaaggctttaaaagcttttacagatgttatcgcagaagaattaaaaaagggtgagaagattcagttagttggattcggaacttttgaagtttccgagagagctgcaagagaaggaagaaatcctagaagtggtgaagtgatgaacattcctgcttccaaagctccgaagttcaaagctggaaaagctctgaaagatatggtaaacgaaaaataatcgatcagatcaggaagataagctgccctctttttatgtgggcggcttcttttattccatggggagtttgcacacaattgcgtaaggaaatcatatgactacgtcaaatcgcatttggcgctcaaagttgtcaagcccctcaaagagtgaggggtccggaagatgaggtgggcttgcccactttgttattccataggaatacaaggagagttattgatgagactagataagtatttaaaagtgtccaggctgattaagcgccggaccgttgccaatgacgcgtgcagcgccggaagggtgacagtaaacggcaaaactgccaaggccgggacagatgtgaaaccgggagatgagatccgcatccagttcggaaataaagaagcggcagtggaagttctgagagtagaagaaacagtaaaaaaagatcaggcagcagaactatacaagtatatctgacattttctacatgatttccgttctgctcttagaatgcttcactccaatcatgtagaaaatggataagatggctgatggaggaatcaaccagtaagacagaaggcaccgtgctgttaaagtttttcttcattgtcggaaggaggcctttccagagccgactggagataatgaagaaaaacccatgcatgtttatagatctcctttcatatagtgtataaactatgaaaggagattttttcatgatagaagatagacaacctatgaaaacacataaagtggatttgctgaaccgttccttaggtgtcattacaggagtgagggatgtggtgtccttcgatttaaatgagatcatactggatacagagcaggggcttttgatgatcaagggatttaatctgcatgtgaaaaagcttttggtggaaaaaggggaagtggagattgacggaaaggttgacagtttcctttattcagatgtggatgaccacaacggaggcaaaaaagaagggctgcttggaaggctgctgaaataatgcaggaagcagtcttaggacagctttacttcttcctgggagccgtctggttcggggcatgcctgcttcttgtctacgacggcatcaggagtttccgtattgtattcaggcacaagatgtgggtcgtatcggcagaagatgtgctgtactggatctttgtgggattcttatgtttccggtttttgtgctggtataattggggggaactcagggggtttttctttttagggctgtttatcggcatggcagtttactatctgctgattagtccgaaggtcctggaaggtcttgtgtttttattacataatataagaagaatctttggaacaatatttcgtgtggtccgtcatccttttgctaaaatcggaataaatgtcagatggagattgaaacgggaaaggaaaaacgttaaaatagccttaatgaggaaggggcacaaaagaggtgatacacatggggagaaaaaagataagcagttataaaaagggtcacagacagcgcacaagagtgatcttatttgtcgtcattgtgttcgttattgtgatgtccattgcttaccgcaggctgtcagaaaagtcagcggcgctgaaaaaagaggaagcacagctggaacagcagatcgacaaggccaaagataaaaaaaaggaactgaaagaaaagaaagaatatatcaagactaaggagtttatcgaaaagacggcacgtgagaagttcgggttattttatcctgatgaatacgtcctccggccctcaaagtaatgataagataaaaaggcagtgctgccggttatgaaaaaggagaaagcctgacggaaaacgtcagactttctttttttgtgtcataggaaattccttcggaacttcctatgacacaaaaaacgctccgcggggatgcacacaaatgcgcaaggaaataatttgactacgtcaaatcgcatttggcgcgcaaagtgtacaagcccctcaaagagtgagaggttggggagataaagtgggcttgcccaccttgtttcctttttttctttccgctttaagcggaaatttactgactataatcaatgataccagttacatataatgaaaagcaaagaggaggaaactatggagagatacaacaagagattgatcaagattcttcatttctttttggaaaacgaaaaaaggatcaccggggccagcattgcattgtctgtaggagtgtccacaagaacggtgagaaacgatatcaaggagctgaaccggatcctggaggatcacggggcggagatcacatcagagattggacaggggtataagcttgtggtggcagatcaaagaaagtttgatgtcctcaaaaagcaaatccagaaggaggagacctcgaagccatttcaaaacatcattccgtctgattcagaggagagggtgaactatatcatttccaggcttctgcttcactccctgaacagcggggagcggattgatttctttgatctggaggaagagctgtttgtgagtacatccaccctgaaaaaagatctcaggaccatagacgggattctgaagaaacatgacctcaggatcagtgacacaaaaaaagaggggatgagggttgtaggacaggagacaaagatccggttctgcatctccgaatatatattcaacagccaaaaagtcacaggggatctgggaaacaagttctataaagatattttttcatctgaggaggtggagaatctaagggtcatcctgatggaggcgatcacggactttaacttgaggcttactgatatcgctttccggaatcttctggttcacagcctgatcatgttgaagcgttttgagaaaaagcgccatgtgaaatatgaagagaatgatattgagttgttttcgggaacgaaagaattccggtgcgcgcagcagatcattcatgagatttatcggaaactggatgtctctctgggggatgaagtctattatctcacgcagcatctgatctccagccagcggtttttgatcgagaatctggacggagactatgaatataaggaagagatagaagaaatccttaagaccatccgccaggggaccgggattgatctatcggatgacaatcaactgatcaacgggcttgccatgcatttaagcgcggcgctccagagactgcgttttgatatgaacatcaggaacgaattcctggacagcattaaaaacttatatccgttggcctttgaacttgccgtggtggccggggaggtcattgaaaagaagcataagctcaaggcaaaggagtcggagattggttttttggccatgcactttggcgcggccctggagagaaaggggttgaaccagaagcaaaagcccaaaaaggtcgtcctggtctgtattgcgggtatcgccacagctcttctgctgaaagaaaaactacagcacaagtttggccagtacatagagatcatcaaatcctgtccggtacaggaggtagaccaggagctggtcgacagtgcggatctggtgctgactaccgtggaactccaggagttccaatcagaaaagatcaaaaagatcaatctgttcctaaatgacgaagacctgaatcatctggctaccgtgatcacagacagcggtaatcaaatgaagatgatcgactacagcagcattttcagaaaagaactgttctttaccggtatggaatttaaggacaaacaggagatcctggagtttatgacagacgccatggtggagaagggatatatcaacggaaagatcaaaaaatccatctttaaaagggaagagatggccacgacagagctgggaagcctggtagcgatcccccatgccttatttaatgatatggaggaagcggcagtctctgtcatggtcttaaaaaaaccggtcatctgggaaaacgaaaaggtgcaggtgatcttaatgctgaacattccccagagcaaatatgatgtctgggaaattgtatttaagaatctgtaccagttcctgatcggcaattccggcgtggcaaagtttgtgaaacagccgtgttataaacaatttattgaggatctgctcaagcaggaagaaaagctgaaggaagcatcaaggaggatataaagtggaaaggctaatcttaaatgaaaacaatgtgaagttgcaggtggaggcaaaagactgggaggaggcagtgcggatcggggcaggaatcctggtcagccagggctgcgccagacagtcctatgtggaagggatcatagatgcggtcaaagagctgggtccttatattatcgtggccgaggggctggccatgccgcacaccaggccggaatgcggagctacggacatcggctgcagcctggttactttaaaagagcctgtctattttgatggagacgaggagccggtgagggtcctgatctgtttttcggcagtggacagcgaaagccatctggatatattaaaaatgatcgtagggtttgtagaaaaaggatggatcccggccatagcggccatgaaggagcagagtgagttatttgacttccttgagaaaaaccaggatgccgaataacaaaaaagactgctgtatgcgtacggtctgccgggcgcattggtatatatgacacaagacaattcatttagaaaaaggaggagagaacatggtaaagattttggctgtatgcggcgcaggcctggggagcagctttgcctgccagatgagtacggaggcggtgttaaaggacctgggtgtagaagcacagatggaccacacagacatttccagcgtatccggagcccatgcggatatcatcatggctgcaaagaactttgaaaaacagtttgagcggtttacgatcgactgcccgaccatatttctggaacggctggtggacaaaaatgaaatccgtgaaaaactggtacctgtgttaaaagaacttggaaaactataagagaagagaaagtgaggagaaaatatgtcagtattgaattttatcatcaataatatcctgacacaggcagctgttattatcggcttgatcgcgtgtctgggtctggtcctgcagaagaaatcagtgggaaccgtcctttcgggaactatgaaaaccatgcttggattccttgtgttatcagcgggatctactgtaatccaaggatccctggcattctttggggatatctttaacaaagcgttcgggttgaaaggccttgtcgcctccattgagggaatcaacggacaagccatgaaccagctggggcttggaaaagaaatcgccatcacactggcaggtatctttgttgtcaacatcattctggccagggtcacaaagtttaaatacatcttcctgaccggacaggcactgctctgggaagccactctctgtatggtatttgcatactatgtaggacttaggggaattccgctgatccttgcaggaagtgttgtgggaggactgtttgctaccctgatgccggcatttgcccagccgatcgtgcgcaagatcacaggaagcgatgatatcgctctgggacatttctgtaccatcggatatatgttcactgccctgatcgctaaatttaccggagacgaatcaaagtcatcagaagacatcaagctgccaaagagtatggaatttttacaggatacctacttatccgtcatggttgtcatgattccattttatctgatctccgcagcgtttgcaggaccagcagcctgtgccaaatatgccggagacaccaactacatggtttatgcatttcttcaatccttacagtttgtcgtaggtctttatgtattgatgtccggagtccgcatgctgcttgccgagatcgtgcctgcattccagggtatctccatgaagctggttccaaattcaaaacctgcactggactgcccggtattgttcccatacgcaccgaattccgtgatcttaggatttatctttacaaccattggatccattatcggaatgttcctgacacctgtcttcggacttccaatgatccttccgggtgtcatgagtaacttctttgctggaggtaccgcaggaatctttgccaatcaggtgggaggccgcaggggtgttatgatcggctgtattgcccacggtatctttatcatgatcctgccggcactgctctcaccgatgttaggacagataggatttgtcaacatgacatgtactgacgtggatacggtcgtgaccggattcttcttcatgctgatcaagtccatcgcaggaatcttctaaataagaatggaggaatcaaaatgttctttttcaataaaaagaagaaggaaacggctgctcccaaagaggcgcagaaagtagacaaagaggaactgttaaagactgctgcccaaaaagagacagagcttgagaatgccaaagatgaagacagagtacagcttctcaatgagcttggctccctgtatttccaggcagaagagacagatcaggcgatcttttattatgagagcagcctaaaggaaagcaaagaattaggaaaagcctacacggatcttatgaagctttataacaaaaagcgtcaggaagcccaggaggcaaaggacgaagaacaagtaaaactgtatatggataaaatctcagaactcatgactttatccaaagacgtcattcggggaaaagcataaaaggagatcaacagcatgtataaaaatttaattgatttattcaaagaaaatgaaggaaaaggagccgtaggagcatttaacgtgcactgctttgaaatgctcccggctatgatcggggcagcaggagagctgggtgtgccggtgatcttacaaacctccctgggaactgcaaaatacatcggattggagccattgatcgctgcagtgaaagccattgcggagaaatcctccatcagcgttgctttacatatggaccactgcaaagacattgaagcattaaaagaagccattgacctcgggtattcttctgtcatgtacgacggttcatccctttctctggaggaaaatatcaagaatacaaaggaagtggtagcctatgctcatgaaagaaacgtatctgtggaaggagaggtaggttccatcggcggcgcagaggaaggtgttgtagtagctaaggatgacgctatgtatacgaaaccggaagatgcactgtattttgcacagagtaccggggtggacgcattggctgtttctatcggtacaacccacggccagtataaatccaaagcaaagatcaattatgaactgctcactgagctgaaagcaaaattaggaagcaccggactggtcctccacggcggaaccggggtttctgatgaggatatgaggcgctgtgtcagagaaggcatgaaaaagatcaacgtgggaacagaacttaacaaatcctatattgaagtggtgagagaaacctttactgcggacgatgtgacaccgctcacctctctcaggaaccttcttggacctgcaaacgataagatcgctgaagtagtaaaagaaaaagcatctttattcagaatttagcggcactttgatgagaccggggaaaccttccgagggatggtgtcttctccggttttatctgttacaatagaacataaggaaccagtcaatgagccgccgaagttttagggagaaggagttatttatggagagaaatgagattttaaaaacggttgaccacacactgctcgcacagactgcagtctgggatgagatcaagattatctgtgatgatgccatcacctatcagacagcatccgtctgtatccctccgtcttttatcaagagggcaaaagagtatgtaggtgatcagatgaagctttgtacggtcatcgggtttcccaatggctattccaccagcgccgtaaaagagttcgagacaaaggacgctatctcaaacggggcagatgagattgacatggtagtaaacctgggagatatcaaggatggcagttatgacaaggtaaaagaagaaatccgtcttttaaaaaaggcatgcggggataagatcctgaaagtcattgtggaaacctgtctgctgactgatgatgaaaaaatccgcatgtgccagattgtcacggaagcaggagctgatttcattaaaacttcaacgggattctccacaggcggtgccacttttgaagatgtggagctgtttaagaagcacgtgggagaaggcgttggcatcaaagcagcaggcgggatcgcctcttttgacgatgccaaacgtttcttaagcctgggtgccggccgtctgggaaccagccggcttgtaaagatcgtaaaggaggaatagcccatggcagtcatctgtgtaggacagtctgtctatgatattgtcataccatatgacacagcgcttgttgaaaaccaaaaataccgggtaaccagacgtttagagtgcggaggagggccggcgttaaacgcggcttatctctgtgcggtctggggagagcagacctatcttgtcagcaggatcggggaagatgattacgggaaaaagattaaaagaattcttctggaagctggagtccacctggaatatcttgtggagagggataacatagaaacaccttacagtatcatcctctccaacagcgacaacggatcccgtactatttttaactttcccggagaagtccaggataagcactatgagtatccggcgctggacgttgatgtgatcttaagtgacgggcatctgccgaagctcagcatacaggccatccgccggtatccggctgccttatcggtgcttgacgcgggaacctgccgggagagcacgatggaggtggctccccatgtggattatattgtctgctctgaagactttgcgagacagtacacgggaaaagcagtagatctggaaaaaccggagctctgccgtgagatctttgggcagatcaaggagatcaacaagagacacgcagtcattacccttggagaaaagggccttttatacgaggcagacggggaactaaaacatcttccggcctatcctgcaaaagctgtggataccagcggagcgggagacattttccacggggcattcgcctttggtctggcaaagaatctgccgcttctttctattttaaagctaagctccatggcatcttctatctcagtggaaagcctaggagggcagacgtccattccggctcttgatctggtggaagacaagttaaaggagcgggagcgatgaaaaaaacattgattttactggcgggatatccgggaaccggaaagacctatatgtgcagcaaaatactggaacaggaaaaggattttcaagtcatctcccaggatgatatgaaggagcagttctgggatgaatacggttttgacaacatggaagaaaagactgcactggagaacaaaagctgggagctttattatcagaggatagaggaggccatgctgcagggaaaccgtttgatctccgactatcctttcagcgaaaagcagaaaccgaggcttcgggagctctgtgagaagtatggctatcaggcagttaccatccgcctggtaggggatctggaggtgttgtttcaaagatccaaacaaagagacctggacaccagccgccatctgggacatgtcgtcagccgttatcacaagggagatgttttgtcagacaggaccaaaggggactgttttgtggactatgacatttttatggaacggtgcaggacacggggatacggagatttccagctgggaagactgatccaggtggatgtgaccgactatagtaaaattgattatgaagaaattttaggacaactgaagaaatggctgtaataagcagaaaaaatctcattcttacatttagaatgagattttttgtatacattatagttattacattaaccgtcttgtaatatggtttcaaccgtgttatgataattaggaagataattaaataatagaagggatataaaattatgggagagaaagaattaacaagcagagaagttttgatcatgaaatgcgtttggagttcagaaagggaattatcaatccaggagatccaggcagaactcagagagcggtttgactgggatgcaaagagatccacagtcaggacttttatgagggacatggagcaaaatggttacatatctgtagaaaggaggggcagacattcttacgtgaaggcattggccggagaggagagctataaaaagagacaggcggaaaagatggttgatttatggttcgacggctcaaaactgaatttggtgaaaacactgacaggaaaagtgtcagaggatgagcagcaatatctcagggggattttagatgagttgggagacgattgagatactgatcagggttttcaccgggatatttctctgttcgatcacaggcagcgttttattcttatactggaaactgatcagcggacgcctggagaaaaagggaaacgcaaggctgaattatgcgattttaaaaattatcattgtttcattttttgttccagtcctttcagtcatatttgagagaatctctcacgagactctgttgttttcaactacgactgtgatcaggagaataacggaggtcattgggatcgtatggatttctggggcagtggttacgtgttgtttttatatccttaagttcatacaactgaaaaaggcactttataatgcttgtatctgtgacaaaaagatccagcatattgctggaaactgcagggacaagctgggtgtcaggcggaacattgaagtctatcagagctatcaggtgccggtgccgtttatctgtggatttttacggcctaagatcatactgccggaagagcagtacaccaagcaggagcttgagatcattctgctccacgagctggagcactataaacagaaggatatcctgtggaagttgctgtgtaatcttatggcgtgtgttcactggtttaatccactaaagaaggaaatctgtaggcagatcgaggattggagtgaggtgtattgcgatgtacatgtgctcaaaaccttcggaagcctaaagcagtatttcaatacgatcatttcgattgccacgggaaaaagcgggtaccgccagtatctggcatctgctctgtatgaaaacagcagagggctggaactcagaatgagaagaaccgcttcgatccggaagatggcggggattccatggaaaagcgcgcagatcttctttgtatgtttttgtacgcttggagtggctacgatttcaggcgcgtcttatggatattacagagggtatctgtatctggaagatgcgaccagcataaagatagaagaagaacaggaccctccaaaagtaatgggggagaaaaaaagggcagggatgtttgcggtgaatcagaggacaatgcaggatgatgtgcctgggaaggagaaggacatatggattgactggtggcctgaggcaggagagagcttgataagcggtaaattccgggcagaagagggggataccattcatattatgctaatgacatctgaagatgagaacacaaaagtgaaaaatagtgaaatacttgcaggtgttatacagccagacggaacacaaaggtttgtctcggataaagaccagttgcagcatagcttccagattagaaaaagtggagaatatcgtttctttgtggaaaatcaaacagataagaagattcaattggcaggagattatgaattgatatctaagaagaacaagtgaggaatggaggtatagagatgagaaagaaaatttttaaatgtttagcaattaccatgctttttgttttaatggctatcccggttacagtctccgcagaagaaattgatggtgaaacagaatatatttctatggaggaagatccagagttaacagtagaaacagtagatgaagttttaatgcctgcctatacaacaagttatgcgttgaattggactgtaggtaatacagtctttaaacagacaaaagaatttagcaagacatctggcagtacagtcagcatttatgcaaagatagcacctacgacaaaaaacgtaacgataggcataaaaaatactggcggagcaagacaatatgtaaaggctacaggaactgttaacaaaacttttaaaataacaaagacagggaaatatagagtttttgttgaaaacaaatcaggtaaatccattactgtaaagggtaattacagaaggtaatgtaccggtatggaagggtggtgataagaatagagaaatttagaacctgtagttttaagcttatacataagaaaattattataataaagatccatgcaatacaaatggccggcaaaccagatatctgcaaaagcagatagcgtatcacatggacatctttattataacagatgctgcaaatgtataaaaggagagaacgttatgataaagaaatttaggaagccagcgctcagtgctgttctgtctttcattttgatgtttacatctgtccagtggggcggtattttagccgcagccagagatgtaaaagcggcagaaacgaaagcagaagagacaaaaaacgtaaaagaagtcattgacagtgagagcacaaagaattccaccacattccgattgtcaggcggaaagaaagagtctgtattttatggacaggatgtgcggtacgaggatgaaaacggaaacttaaaagactatgacccaagccttgtggacatcaaggaaaagactagtgaacacggccataaccttaaagattatcaatatgaaaataaagatggggataagaagcagtatcttccgaagaaactgacggaatccacaccggtgctgatggaacatgatcaatacgagatttcattttcaccgatcaccggacagaacaatactgacagcacagaaagtgataagaaagacgtagataaggaaaatgcatttgcatctatcaataaattgacaaggacaaagcttaagagagagaaagtcctgactgcagaggatgaaaaggaagagctgccagtcagcgtgtcctatgagtctgaagacaaaaactgcacgttcttatatcagtctctggatacgggagtgaaagaaagtgtcacattaaaagagatcccggagagcaaccagctgaagtttaagttctatgccaagggactggaggcaaagaaaaatacagaggacggaggaatcacattctatgacaagaaaagtgaagatatcattgcctccttagaagcaccaaccatgaacgatgccacaggggatggttacagcgagaaactatcctatgatatggaaccgattcagggagaaaaggatacttacgaattaacattgacactggatgaagagtatctgaaggataaggataggaaatacccgatcaccattgatccgacggttacctggaaagggtcaacggatttctgggatgtgtatgtgatcaacggaagttataaaaatacaaacttttatgattcaggcgtcacagctatgatggcgggaaaagccagcaagggaacctacaggacttatctcagatttaaagactttactgcaaagatcaaaaataagtatgtggactcggctacactgaccatgtatgaaaccggggacagcaccagcgggcagacgattgaagccagaagggtgacttccaactggtcaagaccaggtcttacatggagcaaccgtccaggatattctaccaattatggaagcgtcaagacaaccgggacgattcataaatcaagagcgatcaacttgacaaagtatgccagagagtgcgccaacggttccattacctcttatggcgttatgctcaaaaatgccgatgagacgaaaaagtacgggcagttttacagttccagatattccaatgccagttatcggccgaaaatgagcgtgacttattacgatggaccgaccacgcctacatctgcatctgtgactccacagtacctgaaaaagggacagacactcaccgcaaaatgggcagggatcagttcaaagtccttaaatcgggtagaatatcgggttgcaacctatgatccggtgaagaatgcggaagtgaacgccagttaccgtgcctattcaagcagtaccaagcttggaaccacagccagcggaagtgcgtctgtggcagacagcaagaactggccggaggggtgttataagtttgtcatccggggagtagacaacggaggaatcaatggaactgggaaaggatatattttttacatagacggcacggcgccgaagatcaacagtatgaccattgatgccggagatggaaagggaggatcagaggagaatccgtcttccaatgtgacacccgctttaaaatggaatgtgactgaaaaatatctgtcaaaagtggaatataaggttggaaacggaagctatgtcaatgcaggcagcgcactggctggacaggtttccattccagcatctaattttaaagatgctggaacttatcagattacgatgagggtcacagataaggcggggtatactgcagagacatccaaatactactattatatcgacaactccaaggctgccgactataagccgtcagggacaaagcttgtcaattcttacggaaagaacatcgtttcctgggataaaaaagaaggacttccgggaagcatttgttatgaagtatacagaggagggagtgctgactttgttccaggacaggctgatctggtcagagccggagcaaaggattcttattgtgtcgatacaatggctggagacggaaaagattattactacaaggtccgttctgtaaaactatcaaaaaaagggaatgtcattggaaccagtgattttgtgagtgcagggcatgcgaaacagagtgccggatctgaatttaagcagtggcttggatctaaagagtatagagaaacactggaattcagcacaccaaacggaaatggaaccgtagataaagcaggcggtaatcttacctttcaggcggaagactttacaattccggcaggccagcttaacatggggcttaccaggacctacaacagccagtctgataagacgggaatgtttggagacggatggtatgatacgtttcacaaagaaatatatcaggtcggagacaatttgatattcgaagacagcgatggaacttatgtgacatttgaaaagaagggggattcctatgtttccagggagaccaaagactataagctaagctttgaggaagaaacttcaaatacgagaagtgcatctgatacaggcagcagtccggctgtgaaacagtatatgtctaaagcagcggggagtgttgtaggagtcttcggaaagggaccctccaaacagattagttttgaggccagccataatgtgtcctcagattcaccgggaggccagtctgagcaaaagacagtaacgaaaaatattacttatgcatgtaccattacaactaaggataataccatttaccaatttaacagcaatggccagctgacttcaatgaaagaggccaatgataactttattgtctatgaatatgacaccagaggccgtctgaaaacagtaacctccaacaagattaaaacgctgaccatgaagtatcatgaaggagagaatgcagatcttctaaaagaaatcgttttgcctgacggcacaaagatggaatatacttattccggaagaaagctggtgaaggccgtacacagcagcgctgacggaagtgaatctgtgtcatttgaatacgggtatgatgcagccagttttgtaaataccattaaggatgccaaaggaaatgcatatgatattgtctatgaaaataaccgggcagtcaaagtcaaaaagccaaatggagagtatcagaaaatagcttacggagatggacaaaccacagtttctaagcacaaaacgaatgatgagaaaatagcagaagattccattacctatgacaaagcaaatggaaaagttttaacttccacaaataccgcaggaaataagacatcctatcagtatgaaaataccgacaatgaactgctctgcacagggacaacaacaaaaataaattatcagacggtatcagatacaggaaagatcaattttgcatctgaagaagtgaccacaaaaacacagtatgatgccaatgaaaatgtgaccatggaaaaggacgagtcaggacaagtgactcagaccacctatggaaccggtggagaggcgaaccttccaaaaacagaagtgacgaaacagggtgacgcagtcatttcaaatgtctcttattcgtatgataaaaatggaaaccctataaaagaatctgattccattgcggacacagagactgaatgggattatgacgaagatggagaagtcattttagaagaagagtatgaggagggagagcttcaatccaaagaagaaacagattatacagaaaaggatcacattattacagaagacagcacccttacccagggaaatgtaaaagaatcttcaacaacagtcttagatgccatgggcagagagacgcagactcaggatgaaaatacaaaagaaatcacaaagtcagcctacgatttccttggcaggcagacaaaggttcaaaaagaactggacggcataacaaagacaacccaaaagacctatgatgccaacggtgctcttctgtcagaagtttcagagacaggcgtgactacatcttacagctatgacaccttaaaccgggtgaaaacaacgacagaagtctcaaaagacggagttacaaagactacaacgacggattatggatatgccgatcaggaaattcatacactgaatggaactaaaagctatcataatctggaactgacgacaacaacggtgaatggcaccgtccagagccagacttacaccgacacttctggaaatacagtccgggaaaagaccaatggaatttatacagaccatgtgtttagcgaagatggaaaagaaatcgcttccattcttctgggaacggaccagggtgccgaggtcaaaggaaaggtgaccttaaatctttataaccgcgatgggaaacagacccataccatccagaatcctgtcgtatctggtcaggatgtttctgtggatccggatcaatccatcgtgaatcaaacagcctatgacgacaaaggaaacgaatcatctaagacagatggtaacggacataccattgcctacacttatgatgaccagaatcgggtcatcaaggtatctcagggagaaaacagcactaccgtttcttacagcatgggcagtgacggggcttccactacaagcatcacggatgccatgggtcatgagaatattgaagtgaccaatgcggcaggacttagtgagagtacaacagataaaggaaatctgggcgagagtatttccaccaagtttacttatgacaccaatggaaataagacaaaggaaacctatgaaaacggtgcttacaaaacttatcactatgacaaaaagaaccgtctaaccgagacgaatacctacgaggcgccggaagcaggcagtgatacaggaacaagatcattaaaaaccgcttatagttacgacagcaatgaccagcttcttgagatggtggattatcaggtcagcggcaatacagaaaccgcttaccgttatacagaatgtgagtatgatggtcttcagaggaaaactggatatgctgagatcagccagtcagagaaacccactgcggatgagatgaaaagccaccgcatccgatacagctatgactccgaaggaaagataataaaagtcacgtatcccacaacaaaggatggcgtaaaggctctgtcttatcactatacaaagaatggatggctttctgagattcaggcagatataaagaatggggccgatgtcaaagaagcggatgtacggacttatacttatgatcgttatggaaaagtgacagagatcaaagactaccgcaacattctgtctgcaggtgacaaagcggtgaaaaaagtttacacctatgacgactttgaccgggttgcaaagatggtctatacggatcttgaacatccggatacggtgatagaatcctatacctattcctatgacaagaattctaacattgtagaaaagacgcaggtaaataactatccgaaaaaggatcaggaaaaagtcaacgagacaaaggcttatacttatgactcgctgggaagacttacaaagactgttactacagaccatcaaaaggaagacagcaaaaagaccgttacctatacttatgataaggttggaaaccgtctttctgaggaaaaaggtgatacaaaaacaacctatgattataatggactggatcagatcacagcttccaccacatggaaagatggtacagcaaaagagaacaggcagtatgtctatgataagaacgggaatgagataggacagaccaatacaaagaccggggagattatttaccgcacttatgatgcagaaaaccgcctgtccgaagtatctgtcacaaaggacgggaagaatgctgtcgtgcagcagaatcgttataatggagatggacagcgtacccagagggtagaaggtgaaaagacaaccaactactattatcaggacggagccgtatcctacacgaccgatgccaatggagagcagacatcccaggatctttttggaacagacggaaatattgttgggacccagaggtattcaggggataaaactgcatactatgtgtataccaaagacatccagggaagtaccacaaaccttttgaaggaagacgggacggtagatgtttcctatcgttatgatgactttggagagacggatagtgttggggataatacatccgagaatgaaacctgttatactggcggacgttatgatgagacgacggggctttattatctgaatgcacggtattataatccagaggatggaaggtttttgtctgaggatacctatcgtggggaagtgaatgagccggatagccagcatttgtatgtttattgtgctaataatccggtgaactatgtggatccaagtggacataagtttttaggatattggagttcaaaacaacattactacgcatttaatcaaaatgcaccgcaaatgtacgcaggatataatgatttttatgatatgaattcttgggctgtgggtgacttgactacaaagaagattgagacttcacattggcgtttacagttttggaaaggtatatatgggccaccatatgtaccagcggtagcaaatggttgtgaaatcggtttatactatagaaaatcaacccggagcaaacactggaattgtgcatatgactcgaacaaaaggttaagaatgagaatgtctttatatgcaaatgggaaaaaattatttacacgtgatagtaaaacatcgactgaccaaggaaaagcatggtggttaacaggatttactcctagaccatatttaccaaaaaagaagacatggggaaaaactactttaaaaatgacaggtacattgtggtttccttcaagtggaaaatacaggacacaaatgagggatttatctaaaaaattggctaaggctaagtttaaaaacttgaaggtaaacgggtcattaacgaggaggacattttcctggaaaggatggtaggttaatattgaaaaaaggctggatgatatttattttaagtttagttattagttttacaactggatgtaataaacaaacaaatatggcagaagaacagttgtatgaatctatttgtagaccaaatatccaaggtgtaaaggaagctttgtcgaatgataagaagattgctaacaagaatatcaaacgtcatcgcaagttgaagccgctggatctttctttgagagaaatagaaaatgagcgcatccaattacaaatctgctccatgctaatcaaggcaggagcagatgtaaatgaaattggagaagataagctttctcatttatgctgggctattgaaaacaatagatatgagatagcagaagaactgataaaagcggaggctgatgtaaatcaaaaaagtgatgaaggaaattctcctttaagggctgcggtaagtaatttgtatccttataactgtgaaaatagacgaaaaataattgcacagctttcaaatcgtggtgtgaaactggatcgagagttatttacatatttttatcaacataatgattatggaatgaattattatttcgcaccagaaatcttaaaattaatgcagaagaacaaagtaaatcctaatataccaaaagaagttcaatatgcagtacaaggagatgacaaaaaggtacaaaagtatttgaaagaaaacagatccaaaaaacatttaaacaagaatagttttttatcatttgctgtggcctactgtaatgtggatacactgagtgttatgaaagaagtcggttatgatttctcatggaaagatgaagatggtgtgaattgtttacaaatagcagccctatgtaatgatgcaaatgttgtaaaatttctgttgcaggaaggtttggatggtaacagcaggactgattactataaagcagatgctgtctcctttgcagttcttggagggaaattagaaaatgccagattattaaagaaggatgggaatgtgaagtttgaaaaaaataagaatgatggagaggtagtttcatggcagtttattacggcatttggaaaccaagaatcctttgcagcgatgaatgaattggggtatgtaccaactgatattgaagtgtatcatgcctatgaacaagtgaatgatgaaactttcaggtatctattagaccatcactattcaattaaagttaaggaagatggagataacttattggacagtgtatgcttagatgattcaacttacaaagctcaggaactatgtaaaagaggcttaaaggcctcagaggagaatttaaaaacattaatttggattggaggcagccacttagcgaaggagattatggaaaatgggatgacgcaaggaaagatcaggaaaaatgtattgcttcaggaatcaatcaacattggtgatttttctatggtaagatatctcgttaagaacggtgcagaaataaataagtatgtgaaagatgagacagagaatttttcatggacatcaatgaatatggcatgtggaagagagagcataaagatcattgagtatttgataaagaatggaggagatattaataaaaaggattccgatgggaaagattgtaggcaaattgcagaagaggcgggatacacatggaatatcaattatttaaaaagtaaaaactgattttcatgagataatgtactaaactttaaaaatgtgtttttataagccatagcatggctagtttaggtgtgttatggcttctattataataaatgtaatgcttatgttgtaatcatattgaataattattatcatccattaggtacttgctacaatagaactatagagagtaaaaaggtcatttaaggatatatcagatattaatttagttttattaaagaatattgaccgtgatttatatttagaagttttaaatattttagaaatagtaagtgactcatttgctgttattcagccattgagaaactgttgggaggatgttgaatataatgattttgatatcgttaaacagcttatgcattttcatataaaaagcgatcgtgtttcaaaatatgaaggaagaaagaaacatatcattcatactcaaagaaggaaaaagctccctgataatagacatttattttattgctgtaatgagagtattgcaatattaaaatcatatcattcttttacacagatcagagaaaaagaaggagaagtagatttcagcttttttaaagatggttgtgttatttttactacaattattcatgaaaatatgtacttaggcgatcagaaactgttcaataatcttttgtataagaaagattctaaataagtatgacggtaggacaaggatatcgttattttataacgttacttaaggtttaaaaggagtaaacaaatatggttcaaagtaattgcaatacacaaatagtaagatttgataaagaacttctattcgatatttttcttcaagctataacattgattttatttttaatttgcattggtgctcttttgtttattatttattctataattaaaaagttgtttaagaaatataaaaagaaacaataaattgcctaatatccatcaaagggaccactcttgttaattcaatttgcaattacatatgcagaaaggatagagtatgaagaggttgattaaaattctagtaagtatatgtattgtagttggactatttaatttatgtctgttattttttcagaaagtaggaataaggattaataattcatcagagtttagcaatatggcagaggtctccccacaaacaaattgtgttttagtcagaaaaacaaattctattaagaattttccatttatttttggagaacggctgtacctatatgatattgataagaatagagagtatttaat

SEQ ID NO: 23 - DNA, 57259 bp, Anaerostipes rhamnosivorans
atcttgtatattttaattcacatgaatatttttttagattttcctttacgatttttaaatcacttaaaattgtatttttgcttacctttaattcagatacaaaatgttgtaatgataattcctcttctattgtgatcaccataaacgtaattaattgacttctctctaattcagatggaacatagctttgagaatttatttctttcaaccattgatctaataatttcctggacttgattgatacatacaattcacccattctattcttggtgatcgtttctgcccttttttcagtcaaatatgtatttattttctctacactgtacataagctgtcttaatgaaatgttatatttttcttttaattcttctgtatgaattttattctctactaaaatatcacttagtattaattcactacgttcatccaaatacatattctgctccctccttgtaggttcattatattttacgtattgcataattacaatttgaattaatcacactttttgtttatatttcacatgaatattgtgatgaactcttaaaaccattgatattttcacgcataataagcagagcagaataggcaggcctgcctcatttttgccatagggaggttcgaagaactatcctatggcataaaaaaaagaaggcctaagccttcctgaaaggaaaagtctatgtagacagaatcctccataatttaaacccacagggcacaccgtaaaggaggcctttccagatccgactggagataatggagaaaaactcatatgccaagctctttcatcgcatgcaggatatggattctcattgcgctccttgcgccctccgcattcctggcttccatgaattccataatcaatctgtggtcatttaaggtatcctttactgccatctccttttgcctggacagcgtaaccccctgtccgattccctgatagatcacgggcatgagctggttcatgaactcattgtgagtggcctttgcgatagaccggtgaaacagctgctccacctctgtcctgtcttctttgctctgaatcttttcctccaccttgcggccatagaagagaatccgttcaagttctgcgtcgctggccctgagagctgcataataggcggcctccggttcaaagatgagcctcatctcataaaggtcccccgcattgacctcggcatcctttaaaggtgtgagaaacttaagattatccgtatcaatcccctgggtcacaaatgtccccctgcctctctggatctccaggatcccatttgccaccagtgccctgactgcctctctcagtgtagtcctgctgatctccagctccttcgagagttcgttttcattgggcagcttgtcccccggctgaaacctcttttccattgtaatcattgtcagtatttgctccgcaacgctgtctgaaagccgtttttctcccatgatacctctccttctttgtgactgccagaattaatatttctttgaatggctgtattttgatctcttctataccagttgccatactatcgaatgccttattaagcaaattggacagcccttttataattcttatccacagctgcctcccatacatccttcttttatcaacacttgtgataatactgtccagacctgttcatatccttccctggaaagatgaaccccgtccaccgtataggataagggcagttctccatcctctccggccagcccggcaaacacatccacataataataccccctatctttacacagcttttgaatgacggaattaatccgttggatctcatgatttgatttcccctcagaccaaaaaggaatcccgtgttctatgtccttcggacggcgcgcttcgcgcggcaaggtattcataggatagagggattggatgtatagctttgtttccggcaggtattttctgatcctgtccgcagcccgcacaagttgttctgccaccgtctccgctcctctgtaaaaaggcagcagataatcatttgcccctccctgcatgagtacaatatctggggcgaaaggcaccacatccctgctgaccctggctgtcatctccggtgctgtattcccggcttcccccctgttatacacctgggcttttacaacctgaaaaaactccatcggaaagtaatccgtcagtgagtctccaaacaatacgatttttttgtcctgttttctgcataaaatattgatccaccgctccttttgcctgtctgtcctcacatcgtccgtcagccatatattcatgatcccaaagccggctgtactgaacaattttctcagaacaggctctgtctgatcactgaaaaaccgcccttctttttcatattcttctgtcccgtgtttaaaagaagcatagagcacacccccgtgcctaagtgcagaccaaagccttttcaacacatctggaagcccactcttttcgatgtgtagaagagatgcacaggcccagattccatcaaacacttccctgtccgtcatatcctgaaagaagccgtttctcacctcaatatcaggaatctgctctgcgtacctgcacatggccggcgaggcgtccagagcggtcacctgaaacccatgctctttaaaatacctgctgtctcttccggaaccgcagccaagatctaaaacagacccttcaggcggcaggtacttttcaaatactttatacagagggttcatatcattctgttccgtgccgaggataaaatcttccccgtgctgttcataatattctatcgtctgcttctgtttcataaccgtcccctgaatatcactcgtccagctctagaaactcatatatttcgtcaataaatactttgccatccagatggtcgatctcatggcagaagcactttgccatctctccttccaccgtatataccacatcctggccgttttcatccaacgcttctactgtcactttggctggacggaaggtttttccaaagcggttcggaaaacttagacagccctctacacacctctgtgatccgcttttttcagtaatcaccgggttcaccaactttaaataataaccctcgtaatcgataacgatcattcttcttaagattcctgcctggtttgccgccagcgctgcaccgttatccacactgtgtagcgtatccatcagatcatccagctgacgccttgccgtatcatccacctggggaaccactttgcacttcttttttaagatcgggtccccgtccattcgtatttttctaactgccatttgaatctcctcttactttttactcttctttttcagcaaacagtttaattccctccagaaaccgctctccgtatttctcaagcttaaactgtcctactccgcttacctccagcatttcattcaaggtctgcggcctctccgaactcatgcctgccagtgttttatccgagaataccatataaggcggaactttttcctcttttgcgatctccatcctgagactgcgcagttcttcaaacaattccacatcctcctttgccagcgcagaaacggcaccggccttcttctttctgaatttcggcggctgtttctcctccttcttggaaacctttatcgttaatctggctccttcaagaagttcatccgatctatcagtcagttccaacaccgggtaatcatcattactcaaagccaaaaatccctgcataatcatctcgttcaacagctgcttcagtctcggcactgtcatatcagataaagacttatattctggattttcattcagatccctttggcgaatcttttggttatctgcccctctcagaacatccacgatcaggttgataccaaagcttctttggcagtcctgaatgcatcggaccaccttctctgcctgctccgtcatatctgcaaattcaaattcttccagacagttgctgcagtttccgcactccgtgccgctttcttccccaaaataatctaaaatataatgccgcagacattcactagtggcacagtagaatgtgatctgttgaagtcgctccaagtccctctgcagtatgattctcctggcctcccggtccagttcttcattttcttctccgctttcgatcaaaaaacggttggtcctctggtccgaagccccaaaataaagaatacattctgccgcttccccatctctgcctgcccttccggcctcctgataatagctctccatattcttcggcatattatagtgaatcacaaacctcacatccggcttatcaattcccattccgaacgcattggttgctaccatgatctgtttcctgtcatagataaaatcatcctggttttcccgccgctctgcatctgccagccctgcgtgatatctcgtcacagaaaaaccagcttctctgagccggtaacagacttcctctacatttttcctggaaagacagtaaacaataccgctgctgcccggcatcttctcctctttttcttttatataggtttccaactcccgatacttatccctgggctttttcactccgaagaacagattgctccggtcaaatcctgtggtcaaaaccaagggacttctaagctttaaaatatccaggatgtcttcccttacctccgccgtagccgtggcagtatatgcgcccaacactggccgggacggcagtttctctaaaaaagaaaggatctttaaatagctgggccggaaatcctggccccactgggaaacacaatgggcttcatcaatggccaaaaaggaaatctccacttccggggaaagggcaaactgcagaaacccttctgtctcaagcctctccggcgccacataaatgatcttatatcggccctccctggccaggctgagagccttcctgtactgacccatactcagcgaactgttcaaaaaggctgcatgaattccggcctgatttaacgctgccacctgatccttcataagagagatcagcggagagaccaccagtgtaatcccctgcatcaacaacgccggaatctgaaaacaaagagacttccctgctccagtgggcataatgcccaatacatcctgaccttccagaactgcgttaatcaaaggcttctgcccttctctaaaatcatcatatccaaaatattgttttaataagccgtgtgcactctgcataagctgcctttccttctaaatccattgtctgtgatctatgctcatagagaaaatccccgttttatctttcgcggacaagctccgtatacttaagatttttcccccttacttgatcctccggatatttctctgcgtttttgtctaatttatccatgaggcagtccttcagatcaaatccatacatctgggaaaaacgcagaagaaaaaagaacacatcagcgagctcctctgatatatgctctctagaagctcccggtctcatcatctcccgcatctgatcctcagacttaaaacggaacaaatccagcagttcgttggattctgtggaaagcccgatggccaggtccttgggtccgtgaaattggtcccaatcccggtcctcacaaaatctctgtacttcttctgttaaatactttatcgtgtccatattcattctccatggttggttgttttcaacgaatactattattatataacacttttccctcacatgaaatatagatcttcattatttagaatttttttacaatcataaaattccggtttagagatgttctttacaagataattcctcaacttccagcttaaatgtacagaccacgtccagcatttcctcagaaaactcccattcctcttttcctgtattctgacacatgacagcccggagtgcctttttcctctcttccggatcatcgataaactccaccttaccgctgcccgtcacgctttgaaaccgtgcggaataactgcaggccttcgttccttccttcagtttgtaatttgtatcaagttcaaacccagcataatggtttttgcgaatcagatcaatctttcttccctctttagcgctgtggaaataaaaaattctcctgccgttgtttttctcatacccaaagcttaaaggtaccatataaatatttccctcgtcttgaaatcccagcctgcagcaataacagtttgaaatgatcttgtcgatttcctcatcctttatgacttccctgtcttttcttctcatccttccatcctccatgaagatgcttaccgtgaaatttgtctggacagctcttttaccggcagtccattgtccttgatctgctttctccatcccatctgccctgccaatttatacatgattcttgggatacccggcgagataaagcggtcctctgctctgcctccttttgtgatattttccgcaagctctttcagggcttctgagaaacccttctttatcccctttccttccgggatatctgtaaacattggaatcatgcctcctccgccaatccccagaccctgtccccaggagaggcccgctttcaggcaccaacacttcatcatctttagggcaatgtggttttgcctgccctcataaaacccacagtttacaacagcatacaccatcttgtctgtctgtgcatctcttaaaatactttccatctgctgtaaagccgctgtcagttgagatggaatgctgtccacatagagaggaaacgcaaagaccaggatgtcacagtctaagatctggtttttcatctcttctgttatctccggtttgcggacagaaatccctgaatactcatgtcccgtcagcagagcttccagctctttcaaaataatctccgaactgcttcccgaatactttggacttccattgattcctacaatcttcatactcatctgcctcctaactgggacggtgtttcagcaaactgaatgttttgaacatctgcgtacaagttgactgcgttggctttcaccaactctgacgcaatgctcttttcatcctctgtgatctgttctccataaaaccttacggtcagttttaatgtcttctgatatctctgtttatgatgcatttcatcatttttaataacaaaataggggtgcacataaggaatgctccggtcgagaacatttttcacaaaagggctgtagcccccataacagcattggctaatgatctcaacctcatcgcacgcagaaagcagctcacccatatccccatactggtctcttatgacacatttcccgggcgtcttgacccaacacccaaaacagccaatgcaatttcggatctctccctctttaccaaccagctttatatcctcagattctccgggaacaagccgattccgctctttttcttctaaatcatgaatgattactttcatctttctcctttctgatccgggccaaaaacgcccagaacgccacatcaatcattttatgggcctcttcatacgggatagctgcagcatccgtggcaataatggaggcgatcccatgagtatatatcatcatctgctgataaagctctcttgcctgctgcctggaaatccccaggttttcctgtatctcttcctcaaccccatctaccataaaccgggcataaaattcctgaaaattttctgcttccacatagggtgacataaacaaaaggcggaacagatacttctcctcatttgcaaagcttatatggcacaggcctatagattcaaaaaagtttcttttatctgcatgttcttcaatgtatcttccaagaaactgttttgtataagaaaacagctctcccatcagatcctccatattttcatagcagctgtagataggctggaccaaacagcctgcccgcttggctgcactcctggcattgaccgcctcatacccctgctctctggcaagttcaaaggcctttgttaatatcagttcctttgtgattctctgtctcggcatatcaacctcctctaaaataacatttgttatataactatcgttattttaaatccaaacgatacttatttcaacataaaaagagtggaaaacggattatttgtcttccaccctctttttataaagtcttgaaaattccagcacctgctttctgagagctctcagcgcctctttctccctgctcggttcttgatcgtatttgttcagaaggaaaaagatcggtgcgtaaaaattcaccgccatagcctccgggtcttttccctcaaacactccacgtttgatcatttcagcaaataattccgtctgatatgagatcgccgcatccataaaaagaccccggtagacttcatagacctctttgtccctgtactgctcgatcacaagcattctccggaatcgggccgcaaactcatctctcaaataaaacaggaaaattctttcactcagcatcaaaagtccattttcgctgatactgccgtaaagctcggcagcttcatccatgtctttttcatcgggcaggccgttttccctggacatacgctccatgcggactgacatttcctgaacgatggtatcaaatattgctttcttactcttaaaatgcttatataatgaactgtctttaatacccaccgcatccgcgatattttttacactagttccctgatatcctttttctgcaaacagcgtcaacgcttcttcaatgatccgctcttttgtggtcataattcttcccccttaagcaagccttttaccatctgttccttctcaaacagagcacagcccccgctgtggaattcctccagactgccgcttccccgcagttttaaaaacaagggggaacttaacgctttcctgagacttgtatgtactaaattggtgtctgtataaggagagaatggacaaggttccgccccgcctgccgcattgatatggaaaaatcctctgcctgctgccagacatcctcccgaagctttttcatctccaggaaaagagatgaacatcatatgttcctgtttttttctcagcttcagaagcctcctgtcaaattcctgtctctccctttctcccggcgccagatattccgtcttgccgtccgcaggcacatactccacataaactacggctttgcatccgttttcttccagcctgtcaaggaattcctccgatgtaacctcctgcaggttttcattggttaccgtgaccgatactccaaataaaagacggtctttcttaagattcttcatcgtctggttcagaacggaatagatcccggatcccctcctggcgtcagtctgctctctgtccccttctatgctcagaaccggcagtaagtttctcttttccgcaaacattttaaaataatcgtcgtcaaacatggttccgttagtaaacaccgggaaaagtattcccttgtggtttcccgcttcctctatcacatctctccgcatcagaggttccccgcctgccagcaggataaaactgatgcccagcctctccgcctgcccgaatatgtctccccactgccgccctgtaagctccttggaatcaaagccttccttacaagccccatttgccctggcataacatcccttgcagtgaagattgcatttactggtaatgctggcaatcaggaatggagggatatgctctccccttatctctgatttttcccttatgactctggcccttttttctgcagccatgaattttagaagaaaaagacttccttttggatctgacattttaacaatattccgaagaatccgttctaccccgttgctcaagtattcttctaactgaaactcttccataaacctgccctccttctgtgaaagaacaaagtgggcaagcccacttcaacaccccaacccctcactctttgaggggcttggcaactttgcgcgccaaatgcgatttgacacagtcaaatagttacctcacgcatttgtgtgcataatgcccgcagggcttttttattccatagggaggttcgcagaactttcctatggaataaatcaagctagcggttactagccttgttacaacaagtatagctagtaaccgctagcctgtcaagaacaaaaaagttatcctctataaactccaaacggctctggaaaggccttcttacggccacgaggaataattataacgggaggacatcttctgctttgtagtactccttcttagaaacacataccagcaaagtcctttagtgaataggcttcggaaacaaaaaatgtaacagtttcccaacctctaatctataaaaaggcaacaaaactacttagaatggtggattgaagacaatttcaaaggtaaagcaaaaaaagggggatcggttgggaaaaacaaacggaaacattgatcttatcatgaaaactgactataataaaaaaaagaaacggcttaaaaacgttggataaacaaaaacaagtgttgtattgaaatgtcgtttcttcctgctttgtatctttctttttcttgataaacaataattgcatagttatcactaccaaatccggctatgtcggatttttcttttacagaacaatagaaaagtatgccacctccaagagtttttctccattgttggaaggaggcctttccagagccgagtgggcgtgcttcccacgataaggtacaatatctacttagcaaaaatatttttaaaaatggcagttgccaacttctgatgcccatattcatctaaatgctgttgatctttctcactggcttgtgcgtaatcagatgctgccagaaattcaaacccgtatttctctgccagcttcctgtatacatgtttcagccgtcttgatgttttcacagatttccggtcaaattctggatctttttcttctacttctaatccaagttcaattggtgacacgatcagcacttttgttttatctgaatggtttctgatctttattaacagcttctctaaacctttcccaatctgatattctgatgcatcatatacctttttgcagtcattggttccaagcatcaagattacagtatccagcggctgatggctctctaagatcatagaaaaagaatcggtagctttcctccctgcacggctcaggtcactgaaatccgctgtgcgtccacagaggccttcctccacaatccggtattgggacggattcaccatctcctccaacaaactggtccaccgcactccccacggatatcggccttccgttccaggtatcagcccatatgtatttgaatccccaaagcataaaatctgacgcatactgtcacctccaaagtataatatctatactatttctataggaatagtatagatatttaaaactacaatgtcaattaatttatagctttcaacttattttcttagaaaattaaaagtctacaaacttatgaacgctagagaatctctcttcaacagcatatccattccttatttactttccccgaaatattttaaagcagtgcagtagagtgaaatcaatgtagctgagagtaaaacaccactcacaatatcagtgaaccaatgtactcccgacacaagcctgcctatcactgtaacaatgattatcaaaacagagattgagtctgctgcccacagccatattttcctatgccgcagatagtggtggaactgcagcatagccgtgaccatgatacagattacaatcattgtatgagaggatggaaaagatgcttctaaactcccagaaagcaggaccggcctgtaattgacgatcacccgttcaaagaaaaaataaaaaacaacgacgataagataaaatacaccaagcaataatatcctggcatccactttccggatatcccttcggattataagctgggacaatcccatgaccgcaaaacccagggatactgctatggctgctgctcccagccagtcagtgatgctgtaccaaagcaggttcacgccgaataactcaaacacaaattgatttatatgggcaaatccaacgaaagatccttcaggcccaactggttgtacgtcgattgtcttcaccataaccgtgaaaagcagaaaaactagaaacaggattcctgttataatggttctttttcttgattctttttgcatagtagatattcctttcttttactgtaaccatatattttcaagctgcagtttaattatctatccatgcatccaaaagtgcacgaaacctgccgtcacaatgacaaaaaggccccgacacgttttgtgtcaaaggcctttttaaagggtttcagctatttatctggatctgtttccattgtatgaatgtctttgctgcaaaaaacaagaatagcaagattgttacatagggctccctcgcagcggcaaaaaggcagaccgcaaccgcccccagcacaagtgagatttttgtggcaacgttataaaatgtttctctttcaaaatgaatcagggttaatctcaaaatcccaattccgatcatacataaaaatatggcccaataaataaagctgttgatatttgatgtcatcgtatttgtcaggagattcacagaataaacatggccgccttcaagctttccataaatcggaagtacaataaaggccaccgccaatacatcgatcgttgagctgatcagtctgtaaatcttcttcagattagaacggttctcacattctgcaagagttatcagttcatcgtttgatagtaattcatcaatggatactgaaaaaaactttgataaacactttaacgactctatattcggatagccttttccgctttcccatttagatattgctgttcttgatacatatagctgttcggccagctgctcctgcgtaagtccgcttttctttctcagttgttgtagtttttcattaaattccatcggcagtcctctgtcattcattggtttccttcagattcctcagtttttcccgctcctcctctgacacagaatccagaagataacggcgttcttttttctgtttgtcgagatattcctcccgtagtttctggcttgccaaatttacttcctcgagcagctctctggcggaaagcagagaacatccctgtcccctgatgatgatctgttccagcccatcggaggtcgccactgtcacatcatattttcgtccgtgttcatgcgcaaatttttctatatattgatcggcagtctcggcttccttcgtataaaccacatgaatgttatggtaatccagaatttccgtatcgtgtcctgccacccggtacgcatcaaaaacaacgatcagttcacatttcctaagcccctgatagttgctcataatatccaaaagctttcctcttgccgcgtcaatattagcttttgccagttccctcagatcatcccaggcaaaaatgatattataaccgtccaccagcagatactttttccctgaagttttcttgaccgctgccctggatacagaactcttataatcttcaatagtcctttccagtttctttttcttccacccgctcttctgctttctgtttgcaaaatacgtctgctcaatgatccggtcaatctcttctgtgtcgatgaattcctcttctgtgtacgtctgccgtaccgtatcatcttcgttaagatttccgccgtctgaatttaactggctgtccagatgcatatagtccttcacctggtcccagctcaccgtaaatcctgccccgtgggaacaaaaaacagatcctgtaggattctttacatctctctcagaatcataaccaaccttttcaatcacctctttggcattgtggcatggctcataaccctttaaagtacagaaaagacgcccttgtccttttgtataggcgatgacttccttctggtaatcgcacatttctgataccggcgcgcttccggccaatactgacatctccccttccgtctggggattctcaaaactgccagacatccgctcaatatccgacatagcccgtcccaccatctgctgaggcacttccagccggaactcgtagtacggctccaacagcacactctctgcctgtttcagtccctggcgcactgccctgtaggtagcctggcggaaatcccctccttctgtatgctttagatgggcacggcccgctgccagagtgatcttcatatctgtgaccgccgaacctgtgagcacacccgggtgctccctctcctgtaaatgcgtcaggaccagccgctgccagtttttatccagcatatcttcactgcacgaagaatcaaactgaaggccgcttcccggctccaatggctccattagaagatgtacttccgcataatgcctcaagggttcaaaatgccccacaccttccactgtgttattaatggtctctttatagacaatatttccggttccaaattctatagaagtatcaaacctttcctcgatcaggctctttaatatttccagctgcacctctcccatgatctgcacctgaatctcctggagttcttcgttccacacaatgtgaagctccggctcttcctcctgaagctgtcttaacttgggcagcatcacgctggcactggtcccttccggcaggatgaccttataagtcaggacaggttccaatgccggttcaaaaccaccctcttccatcccgaatccatgacccggcttggtttttgtaagccccgtgaccgcgcacactgtacctgcctgtgcttcatctgccgtctgatacttttctccggagtatatgcggatctgattgaccttttcctcctcatcaccgctttttaaaactgcctttactttcagcactcctcctgtgatcttaagatgcgtcaggcggttcccctgactgtctctggaaatcttaaataccttcgcaccaaactccgcaggatattcaatctctctggtataggtctcaatcccctttaagaattcgtgaacaccttctgattttaacgccgaaccgaagaagcatggaaaaacctttctctctgaaatcacttctctcacgccgccggtgtatatcttccctgactccaaatattcatccagaagcttttcatcgctgaccgcgatattctcataaaaattcccgccatcctgcatggaaaaatccacacagccttcatccaagtatttttttaactcttccaaaagcagttctttatctgtcccgtcctggtccatcttgttgataaacaagaataccggtatctgatattttttgagcagacgccagagtgtctgggtatggccctgtaccccgtcagccccgctgatcaccaggaccgcatagtccaatacctgcaaagtccgttccatctccgcagaaaaatccacatgtcccggcgtatctaaaagagtgacttccatatcttcaaaggcaaacacagcctgttttgaaaatatggtgatccctctgtccctttcaagctcatgggtatctaaaaaagcatccttattgtctacccggcccatactgcggatacttccgctctcatagagaagcccctccgagagtgttgtcttacccgcatccacgtgggccaaaattccgatcactaatcttttcatactatactcatttctacattcataataacttgtcttacttattataccttatcaagaagaccacgcaaacctcaaggtaaaaatacgatgaaccatataattacagccccagattttctatctgaggctgtgtttcattttatttcttctgatatacagagtgccctaagaactcccatttcccatgtcccggacggataatctctccatttccgagaaacaggtatcctcccggttttaagctttgatacagacctttcaggatttcttttttcttctgaatatccatatagacgatcacattccggcagaatatcacatcgtactggttctcaggccattgaagctccgcaagattatggtaacggaactgtaccatctccttcagctgccgtataaccgcatatgcgctgccatctttttgaaaatatctcatcttccagtctaccggaacttttaccagctgtcttggaagatacctgccttcctcgccctgtgtaagctcgtgcctggcaatatcagttcctgtgatctcgatcttgggaagcttccatccgcgtctcctgcactcttcggcggtaatagcgatggtataacactcttctccggtagcacatcctgcgctccatatacggaatgactcatcctctgtgctgtttttcagcttctttagaacctcctgttcaagataacggaactgtccgctctccctcataaaataagtataaccggtggcagtcaagtcaatcagcttctgttcttcctccggatcttcctgtaccgccttcatatacgctaaaaaatcagtgagatgaagcctttctaattcatgctgaatcctacattggatcaggttctttttgttagaaagcttcatcccatatctattctgaatatattctgtcaatgcgtcatattcgtcctggttaatctcaatcatttcttctactcctaagcttcgcagagctatctgtcattcatcgataagctctactttacaactctttcttggtcttttcaagatgttccgttgaatatggacattatttctgtaatttctctaattcattctttttttcaatgcttttccatacctatttgtctctctcatacatcgaataaaactctcttttgtgaccccgctttttttcggacgaaattcccattctgtggtcgttatggccttctctgccatcgcctcaaattcatcctccgaaacttcaatatcatcaaaacataccggcagccccatacttaagttgaatccggcaatccgctctctctcctcaagctcttctgcaaatgtcaagagacacagaacaccaagagataccacttctccatgaaggtgctggtggccgccctttgtaaccgtagacccgtaatatacacaatgggccaggctggaattataataataatgaggtgcgttgctgaccatattggataccagacctgtgcttataatgatatccagtgttacctgctccagtgcgtaagaaacctgtttattctttagatcctccagtgcctgtcttccatattcaactagggggctggtgcagatgcggctgagctgtacgcccatcataggtgtatgggacaattcatcttccctggatgcgaacactgcttcacattccttgctcagggcatccccaatccctgcccataaaagctcttccggagaatccgcaataatagatgattctataaatgtatgatccgccactttcggatagtaatattccttgaaagaaccatccggattgtaaattacggagatcgccgtaacagcagcacagttagaagccactgtaggaaaacaaaataacggtttatccatttcatttgccaggtatttgcacgtatcacatgcacgtccgcctcccacggcaaaaaccatgtctgccttttttactgcttctagctgcatcagcgcatttccgttctcataagtagaatctcccccgtaccagacaaaatccaagatttccatatcagaatcttccactccctctaaaagcttttccctggcctttgccatagcagtctttccgccgatgacaaccgcggtctttccaagaaaacgcgcagtcttcggaatctcgccgtaacacccctctcctattgtataacttggtaaatttacactgtaataacccataaataaaactcctttcccggcgtagctacagaacaagaaagaatcccacaagcgggattctccgcctgcggcgggtcgcattggcgacataaatccttaccgccgcagtgcgatcctcgcggagcgttttttatgtcataggaggttccgtaggaatttcctatgacataaaaaaaagtctctttatgtccgaaaacataaagagacgaaataatctatcatccgcggtaccactcttttttgcacaatcatgcacactctggatatctgacaatatccggctctgtaacgggagctcccgtcttaaattactcttttacttcactcaagccactcccaggtgatgtaaggcttcccgttctttccggctttcaccagccgccggctctctgcaaagactaaaggatgctctctgtcctgatcatcgtgttttcacatttaattttcttttatggaagttattatagtcctgcctgagagaatatgcaagttcttttattggcaaggtataatgaccactctctcttaagttcttcctgccttatattcacggatcatagtttcaatttcattgtaatcccgttcaaataattcactgcagatctgtctccccaattgttcaggcggtaccttctcaacgatcttatcaatgacaaatatcttgcttttctgcttatatttaggaagctggtttaactcctgaatatgtactaactctggcctccacaaaagactcagcttcttgttccatataactttcttgtttattcccggctcccggagtaagtaaaaatcaacctcccctgcgatctcttccacagtgataattccccaccactctggaaccttctcttctacatgaagtgcgtggctggaacccacaacaacataattataatcaaagaaccggtcataatccttcacctgccgtgacagcctggcataggaatcagcatcacttttaatctcgatgccatagacagcatactccgtgaccataacaatatcagcacgggaacgtcccatctgcttttcctcgatgattctgattttcccatgccgctcctccaggaaatcaaaaagaggctcccggatatctttgtcgtataacatatcaactcctggataaggtaaaccctatcctattttctttcccatcagttcatagtaaaaaatatactgctgcatcacaccttcacaccctttatatctgtccattgggaaaccttctggataatatccgtcaagtgcctgcctgatgtgcgtatccaccgggaatgcctcaaaatggtgcagggaaaacaggcaaatacagtctgctaccttttcacctaccccgtacagcttcatcagctcttccttcgcctgaccataactcatgtgccgaatctcatccagatcaatttccccatctgctacacttttagccgtacggactacatatttgctccggtagcccagattgcattcttttaatgcatcctccggcaggcatgccatggactttggcgtgggaaaagtgtaatagatatgcccgtttgcgtctttcctttcttccccatatttttcgcagatgttatcaatacatctgcggatacgaataatattattctgctgcgagatcaggaaagaaacaatcatttcccacagatcctgattcagaatacggatgccagagccaaactccgaagcctctttcagatatttgtcctgctggtcgatggactctctgtactttatgtaatctgtgtccagatcaaaataacccttccagaagctttcaaactcatcttcttcacagtaaaaaatacattggtcccccttttgagccacctccaggtgcctgtcccccgcgatgactgaatatgtctgagcatccttcttaagcatacggaaacactggccggaatcacaaatctgtgctatgtcaaaacatttgattgttttcgttatcataagtatccctgcatctttctattttgtcaaatcagtagttattctaacagcttatctatacggtctaatactttattgtaatttatggaactgtaatccgtaacatccagttccagcagttctcccagaaggaacttatcataccccttatgttcacaccggtctctgaacgtctcatatgacaacaaggcatcggccttggaccggtcctccatgacatctcctaagtgatatctggtcaccagatgtgccaaatgcctggagggatctaagtctctttccctggatctttggtatagaacatcaatgtcccccagcagccggatcgtaacagcctgatatccatattgttcagtcagttcctcaagcctccctttctgcttctcactgaacggatagtcagaaatgattatctgccccttacgcatcccagcccctaatgtttcataataaatcttccatcctctttcttccaatgccgttttctcttccaggctgtcaaaaccccaacggtcccacagctcctccttgatctcatcctgggacacaacaataaaaccgctgtgtctgccaaggatctgattacacaaatatgtcttccctgttgccggatatccggcaagaagaatgatcgtctttttcataaacatctcctaaataagcagactgccgttttaaaacgacagtctgtctttatagtgccaattcaactgtcagatagtaggtatctgcccggtaataagcttctacatattctcttggaatgttttcttcgtcaaacgagatacgtttcacataaatgagcggtgccccttcttcgatctttaacagcctggccgtccgctcgtctgccaggattgaatagatcttttcctcagctttagcaagcttgatatggcagtggttcacataatagactctcagggattccttggagaaatccctctccatagcttcaggaacccactggtggtctaaataattgatctcaatgtacataggtttgtcgtcagcataccggattctctccagcttaatcacctttgccttttcttctaaatgaagattctctgcaacttcactgtccgcctctataacggtctgatttagaacctttttggaggcaactcttgtttcttcccggtgctctcttaaaaaattgacaatcttctggttatcactttttgccttcaggcttttcacataggtgccgtgtccacgcttcttctcgatcaacccttcgtctgccagcatgtccatagccttgcggaccgtggcccggctgaccttgtagctggccatcatttcactttccgcaggtatcaggtctccgatctgatacttcccgcttacaatatcctgatacataaaatcataaatctgatagtaaagctgttccctgccgctgaaatccaattcatgtttcatcgcttacacctctctgcaactatatttctaaaattattccatcaactctcctccgaccaggttgatggactgtccggtcagatagctggaactgtccgtagttaagaagatcgccgcatctgtgacatttttcagatccaccagcttgtgcatcggaatattcttcttgaaatacggaagtacctcttccggatcaagatcacgttttttcgcatattcgtactttaatttttcccacatttcagtaggcacaatccccggacaaatggtattcacccggatcccctcgtccgcgaactctttcgcgatggactgggacagtccctgcactccgtatttgcttgcacagtaaatcgtctgccaggagcttggcttctttccggacaatgaggacatattgatgatcgtcccgccgtggccaagcatctccctgactgctgcctggcagcataaaaaggttgccttcaaattgacattgatcgtcaggtcccaaagctcctcgctgctgtccagaaacggagccatctttgaaaatcctgcggagttgatccatgaattgattctaccatattcctctgagactttgcatgtgttttcatcaatttgtgccttcacggtcacatcagtcttgtaaaaagacgccgtccctccaaatgcctggatctcgtcaacgaccttctgggatttttcttcattcagatcaaagattgcaacctttgcacctctctttgcaaactcttttgccatggcagctcccattccgcttccgccgccggtgatcacggttaccttgtcatctaatctctccgtattcatcgtaaaacctcctttatttttttatatactctgcaatgctgacctgcttatcctgaggcatcacctgcacaaaaacgttgacccctttttcgatcagttccataaagtttttgttctcatccgggtttgtggaaatatttttatacagcacgcttcttccttcttttgctcccattccacccacgtcgatctcgtcgatctttattccatgatccacaagataattgaggatttccggtccctttaccagaagaatcgtaggggcatctagtccctggctcataaactctgccgcatcctgccggttaaagatcccaatggcgatctcatccggcaccgccatctccagcacattaatcataaaatcatcttccgccacttcgtcgtctgccacgatcacctgtactgcgtttttctgcttaatccatgcggtcattacctgcccgtggatcagtctgtcatcaattcttgttaagactaagttttccatgctttttcttacctccttcacttaaattcattcctttcactgccagtgcctccggtgatgtggcagctccgatcagttcgtccagtgtactctccccagtccttgcaaacacgagcgtgatcagcatcggcatgttcatgcctgagacaagtccgatcttatggtcttttgctaaatatccagtgctgttaaacggtgttcccccggtcacatccgataaaattagggtcccttcttttgactcatgttcctcgatttcctttaaaagctttgcccgataggcttccggcgcctctcctggaagaagagggacagccgaaactgcctcctgttcccctgccaccatggttaaactctccagaagtccctggcagaaatgtccgtggcttactaaaatgatatgtatcatgattcctctccttctatcctacaaatcccagaagtcctaaatatgatgctgcaattccaatgacaaagatacccactacaatccatgtgacattgatcttcttagaaactagtttccatacgaccagtgtgatgactaaaggaatcaatcccggaagcagtgaattgaggatttcctggaacttcaccactccgcttccaacagaaaccttaaatggagtgttgactgtgatccttgtagccgccatacatcccacaaccatcagccctacaacgctgaatgcattggtaactttatcaataacaccatttttcaggattttcagcagtgttgacttcccgtatttgtaaccattcataaacatgaagtaaccacaggtaaagatcaggacttcaaataaaatagtgaagaaaacaggtccgatgtaattccggtccagagccatggtgcagccaatacccgctaaaatcgggaacaggattccctgcataaccgtatctccgattcctgccaccggccccatgagaccggtgcggacggaattaatatcttctgcagacacactctctccgtttgcccgtgcctcctccatagaaaccgtgatgccgttgatgatcggcccgatggtaaaaacctcagaattataaaataccatatacttctttaactcccttacacggtcctcgcttgattcatagagacgcttgatcggaccgagcatcaggtttgcaataccaagggcctggaggcgctcataattataacaggcttctgtgctggtagtggccatccaggttttaaccaggtccttctttgaaagcttcttcttataatcctttacagaagcctcctcagtataatctgcacgttcttcgttctttttcaaggtcaggcgttttacctttttcgttccttcttcttttttattatcggacataaacatgacgattgcaatgattgccgcaaagattgcgatggccatgatatccagttttagatagatggtaaggaaaaatcctgcaaaaaagtaagggaccaattttttctttccaagatagttaagcaacatagcaattccaagtgcaggcatgatccctcccacaacctgcagcgcggatacaagactcttaggaatggcattgatcaatgccgtaccccacgatttccctgacatgaccagagcaaaagcgggaatgccgtataatacgaacgccaccagacaagagggcagaaaattcatccaccgtactccgttgatatttccattgtccagcatggcatcggctctgtgaatccagaaggaatttaccgtcatatagatctggttcagcaaaagcccgaacatgctaaacggaatcgcaaaggtaactgccattgtgggactcgcccctgaaagaattgtcattgccgttccgaagatgcccgccacgatggtattgctcggcatagttccccctgcggagatccatcccagataaatcagctggatgttggccccggcaagcattcctgtcatgggatctcccatgaagattcctgtcagaagcccggttgtcagcggatataccagacattttgtcaccgggccgaaaaaccaccattgccccattgttgccagcaaagctactaaaactgctgaaagtaccattcttaatcctcctttttctatttaatgtttcccgctcaagcggaccattactttccctttttttgcattttcctgtgtttttaattcctcttccatctcttccagagaaaggcttgcgctgatgatcgcatctgtattcaactttccgctctccagtaatgctaccgcgcgttttgttgtatgcgggtttaagtatgatgtataaatgctgagctcctttgtataggcttcaaactgattcatcaggatcggctggtcaggatcacccaggccaaacagcaggacctttgagttcttgcctgcaatcctaaatgactgctccatggtctgcttaagaccgatacattcaatgacataatcaatgttcaatctctctgcgagctgttcaatctctctgtcatcaaccgcataatccgctcccagttccagtgccagcttctgcttttccggctccctctcgaccacaataatccgggatgctcctgacaatttcaccatttgcagcatgaggcttccaatagatccaagaccataaatagccactgtagctccgccctgtatctgaatcaaatccagtccatggatcacacaggacagaggctctgcaaaagccgcatctcttaagtcaaggtcttctgaaactttatagacgttctgctccggagggtagacataatcggaaaatccctttgccaccccatgccgttcaaggcagaagttcggaagtccctgctggcagtaaatacatttcccacagccaaagctgggatctgccgctacccggtctcctggcttaaagtattggacatccggtcctacggctgtcacgatacctgagcactcatgtcccagaatgattggcgggatgacgggacttgccccattcttcccctcaaatttatgtatatccgttccgcacaaaccgcaccaggccacttcaatctttacttcatcacccttcggctcccgttccgggatctctctcacctcataggttctgtctcctgtataataacctgctctcatctgcttcacctgccttaattgagatttttaaatagtttgatcttgccctggactacttcgttgactgcctcaatacatgggacaacgttattccgcagagatgcattttctgaagtatgtccgaaaagctcttttgatttttttgtccatgttaccaggagctctgtacccacattgaatttccggataccaaggtcaatgacctttcttacatcttcatccttaactccagtacctccatgaatgaccagcggcaggtccaccgcctctttgatctccttgagacgttcaaagttaatgttggtcttagatttatattgtccgtgattcgtcccaatggccacagccagtgcgtcaatccctgtcttctgtacaaaagtgaccgcttcttccggatcggtgtacttaacctctgcctcggaggccgccaccccgtcttcagtaccgcctacgatgcccagttctgcctccacagagacatcatgcttttttgcatattcaataatctgctgtgtctttaaaatattttctttcagaggcagggaagatccatcgaacatgacagaactatatcctgcatcaattgcttctttgatatcttgatactcttttgcgtgatccaagtggagcacaacatcaattcccgcctggtctgacatgctttcacacacagataccagatttctgtgccccacatagtttgccgttcccacactggtctgtataatgaccggagtaccctgctcctttgccgctgaaataatcgccggaagcatttccaggctatgggtgttaaatgctcctactgccatatttaattcatctgcttttttcagaactctgtttaaacttgtatacattgaaacctcctcgaccgtctgctgttctacattgcctcccgtaccgtttttttgtttcacctcccgtctgtccgtcctaatattataatgtacggacgtttgtacttttgaatgtattatacaacgctttttttgatttgtaaacagtttttaagccagggaataaaaaaaaattccctggcttttgctgtcttctcatattttgtatctatttatcagcggttttcctccgaccagatcctgcactgccgaagcttaggctcagggtcaaatccttgatctacccccattgtagaaagcatctcacacggaaactctggacagaccccgcagtgatcaagcgtcttttcctcgcagcaggccttcactttacattcacctccccaaaacggaagcttcatctccaggcatcccttacagttgacctgctcttttctatcacaagaattacagcagactccgcaccttgactcaaacattcctcaccctcctatgattctactactattccttcaatcctcaccttcctgcagatattcctgccggaattctgtgatccactcggtgaggacctctgtgaggcgcatctgctgatccaagatggtctttcccgtcaatggaacatgctgtctctcctcacttttttctttgatttcttccctaagttcctgaatccctccttccatccggccgatgagctctgctctcttgctctctgagacaaaattcaggttcattaccaccgcattaaaatccaaaaacagcctcaccattcctcctgaagcttcttccatcagcgtgagaaaatacttgtcaccctgatctgtgatatggtaaaccgtcttctccggcatcttcccttccttgacaatctctcctaacagatatcccttcttttccagctgtactacctttttgtagattgaaggggtactgaccttcacccaccatgaaatattcctgtactcaacattcttctgcagctcataggcactctgaggctgtgccttaatcatccccaatactattaaatcaattgtcgccatcttgtccctccattcatatattttatattactatataatacactataaatcaatataaaacggccagtcctcactggccgtttcacatctgtctgctctatttattttgccgctactgaaaaccacaattcacaggtgtaatcttctgacttcacattgtccccgggatataattcaatacacatgccgcctgacggctgatatcggtttgtagggaacacttctgtatagaccttcttcatgagatcctggaaagcacccggcaaaggtcccgtacaggaaaataccatccaggtattcgccggtatctcttctatcgtaaatccttcctttacttcactgccatcatatgcagcagctatggcataatcgaaatcccctttatccgggctgtcaaaacatacccccgccactgcttcgccaaagaccccatccggacggatataactgcacaatgcctcgattgtgccgtccttgccgcattcctcccatgtcctatgaatctgctgctggccgatctctgtgcctccggtgtacctctttttcttagcgatcacctgaaaagcatctttctcctcaattctataatccatcactgttcctccttctaagataagttttacagagagacgtgaaaaggatctcagccttgctttgtgggatctggcctcagatggtctgattccatgaaactttgtgaaagctctgctgaaactctcaggactgtcgtagccatacttcagagcgacatcgatcacccggcattttgtggaggccagttcactgccggctagcgtcagcctccggctgcggatatactctcccagggtacagccgcagagaatcccaaatacacgctgaaaatgaaaattagaggaatatgcctgccgggcgacctcctgataatcaagctcctccgtcaagtgggattctatataatcaattgcgttctgaagaccggaaatccattccatgttgttcactcccttctgctgtagaaacagtatagttgaaatagtacaagaaagcctgacaatttgtgctggcccgtgtgaggaataatttgacattcatctaaaaatatactataatcatagttgtaacataagaaagttcttgtttaattttatgtaatatataaatgaggatcaatgcaatgatgaaaaggaagtgatgtctatgaaaacaacaaaatccatgtaatacaagtggccgccaaacctgcatctgcaaaagcagatagaagtatcacatggatatttataattttagcatgtgtaattgtacatatcaagaaagtagatttaattatgacattttcaccagttctccggcttgctgtctcagggacgtaatgtctgctggagatggctgttgcaagacaaaaggtgccacctacgatagttttttcttcattgtcggaaggaggcctttccagagccgactggagacaatggagaaaaactcataccttatcgtgcgaagcacgcacgcccgaaggccataatatacgggatgccctgtgggtatatatatatttactttcatcagagaaaggatagaaaaatgacatcttcaaaaataaaaagtattttattaatagcatcacttattttattttctgcaacaactgttagggctgatgatactaataatgaagttttcaatgaagaaggcatcaaatcacttgaagccgcgattaacaaaaagccggtcgtttcagaaaataacactgttaatagtaaccttctaagagctaatccaaaaggttatcctgaaagaaaagggatcattcttgtgaccaaagataaatataaagggttaattccgactgggcatgctgcaatcatatatagccctaatactgtaatagaatccctaagtaaaggtgtgacgcaaggaaaaaataactggtataaaagtaaaaccacttgttatggtgtaatggcgaaaagggcgtctttaaatcaaagtgcttcagcagcagaatggtgcaaaaataaaataggcaaaccttacaattataactatcttaatgtgaaaaccagaaagaaattttattgttcccagttagtttgggctgcctttaaagacaaatataaaattaatatgaaccgatcagagtatggagctgcagttcatcctttggagttagttgcatcttcagaaacaatgctactctaccgaaaatagtaggagactctatgataaaaaaaattattttacttttactgacatgtattataatcttttctactgcctgtagtcataaacagaacagctttaggaattttgaattttgtgtaatcgagacaacagagcagaaaaatcaaagtattttatctttttatgataaaaatttcaagaggataggtcagcataagataccatatgcagattacgggagtctttttacccctcctgttgtcatgaacaataatgtatatgcaattccagaaggagtgccctatgtcaaagagctggagattgtattggaatatcatttaaaagatggaacagttaccgaaatgaattttaaaaaacctggtttgttcagctttgctgtttccacagattctatttatacaacaaatatgctaaatggaacatcatcaatcagcaaataccataaaaagactggcaaggtagaaagaatcaatacaccatcaactatccgtaattataattttatttactcttgtgatgacggagtctatgttaccgctaatcaaagcaaacagaataataccaaaagctatctaataaaaatcaatccagatcatttcaggatcgaatgggaaaaagatattagtgatattggcagtgaaacaacatttttttactcagataataaatacctttacttcactgttccaaaagataaaaaatataatcctgagagctatctggtaagaatgtcttttaaaaatcaaaaaatcagaaaaattaatttaccttattataatccgcaacaaattaagccttataaacataagctgttaattacacacaacgatatgcatggaacgggtaacaatattacagtattcaatcctaagaaaatgcaaagcaagctgctgacattagatcataatattgatcagatggaagtaaaagatgataagatctatgtactgggagaagatatgatgtaccgataccgtttagaaaaagacaaactacttttagaaaaaaagacaaatgtgcagacaaaaaagggtggcagcatttactattatatcagtagcttttttgtaaaatgattgccacgaaactttagtcagttcggtcttttcctgttgaacaaaacactttatctattaaccaataaagaacggtcagattacaggccgctctttattgtgctttattttttacttacccatagtataccttgagaattaattttttcatctcttccgctgtcggcgaaaccggattaaatggggctgccacgtcacccatagctttttgtgtcagcttatccacattcttgacaaaaatgtcctcctccactttttctttcatggattttggaatctttatcttttcacttaactctgcaaccgcatctgccagtgaagcttttccgatatacattgcaagctcatcatacattctttttacttgtatatcctggctattatattctaaaccataaggaagcacaattgcattagcaagcccatgaggcactccatattctgctccaaaggaatgtgcgatcccatggacaatccctaatccggaattagaaaatgcaattcctcccatacaggatgccgccagcatatccgcccttgcctcttcgtcttccgggttttcatacgcctttactaaacttccatacccataaagaaaagatgccaatgacattgccttggaaaatgaatttgcagccggggtcacataagactctatggcatgtgtcagggcatccattcccgaagcagccgttaaactctttggcattgtggccgtaaactcaggatctaaaacagccacatccgggacaagtcttccgttcatatccctgacggaatattttttcttctgctcaatatctttgatcagagccgccctggtcgcctcactacctgttccggcggacgtggtaatacagcagacttttgcttttaccctcagattttcaatcgtattcggaggaatcgtctcatccaatgtcttgtaggaaggattctcataaaatacccacatagcttttgctgcgtccatcgccgatcccccgccgaatccaatgatccaatccggctcaaaggccttcattttttccgcaccctttaatatcgtttgaaaacttggctccggttccacctctgtgtaggcttcgtactcaaaaccagcttcttctaatatatccgttacttttttataagaaccaacctccataagaatgtccccgctcatgacaataaatgcccgttttctaggtccatttaatgttttcagctgctgcactgcattctttccccaatacattttttcacatccaagtttaatagaatacatgttatcaccatccttttgtgtctagtaaacaatgcagtttttaatcaccttttgggctgcatgttcaagaaccgcctcttctaacctctcaagcggatattcattttgaataaaatcgtcgcttcggatcactcccatttctaacaattccaatgcactcctgacatgtcttggcgttgtatggaatgcgcctttgaccgttatctgagaataatgcagaagggtcgcatcaatatgcaggatactattttcctttgtgcccccaaacagaaggacaaaaccagcttttctggccatcttgacactgttttcccatacgccgatcaggccggttgcctcgatcacaatatctgcgcctctgctgccttcggtcatcgcctttaccgcactgacactgtcctcaatctctgaaatatttaatacctcatggacccccagtttctttgccagctccaatcgattctctgctttatccgtgacgatcacatgtgcgcctcttagaactgctagtcttgcaaacatcaggccaataggacccgccccatttaccactaccacatcgcttaaatgaatcgggcactcttcaatcccgtatacagcacaggaaaacggctccatcagtgacgcgcttttatgtgaaatggaatcctttagtataaacatgttctgctccacgattctccccggtactttcacatattctgcataggttcccctgttaaacatcatatcttcacacatagacggaaacccttttttacagtaataacactggccgcagggggctgtattgtgcacagctaccctgtctccctccctgaaattctttacatttctgcccactctggcgatgacgcctgagaattcatgaccaaaaggatgaggcggcttcaataatgggtaccctcttttatatattttcacatcagtcccacatgtggtggaaaccttatttttgacaagtacatccccgtccccgatttcaggcatttcgcattcttcaattcttagatcttcttgttgatacaaaacagctcttctcatcttcattctgatacactgtccctccatcagtaacaattggacttctgttcttctttgtcttttttgggctgtccgtatgacttgaatttctccataacaacgtccatttcttcgtcacttaaaataaccggctcaccaattgacattgcacgatactgcatttccgcgcagaattccatatttacagccaggccaaaggctttttcaatactaggtccgcatgttaaaaggccatgattcgcaagtaaaacagcttttcctttgttgcaggctccaatcgctgcctccgcaagttcgggagttccgaatgtacggtatggcgcacatggcactgttgcggttccggcgcctccgatcacataatgcaaagccctgagcggcatatgtaagcatgcgaatgttgtacagtaagtcgaatgtgtgtgcacgactgcccttgcgtcaggtttattaacataaaagatggtatgtaatccccattcactggagggctttttatcaccttcaacaacctttccttccaagtccattacaactacatcttctgggacggtctcaaaataccctacaccggatgggctgatagccattaactgttcttctgcattataaatactgatatttccgcttgtccctttgcttaagccggcagaactcatctttttaccgtactctacaaccaattctctttctttttttaacaacatttcgttcccctttttaacgtgtgatctgttttaagttgactgccatatcgctggtttttgtctcccaaaaatgattgatcgtatctgccagaagctttggagattttggcagggcatccacaacatttccggcattatgcggtgttaaagtaatgttatccaatttcagaagcggatcatcctgatctaatggttcattccaatatacatccaatgccgctccgccgatccttttgttttctaagacatcaagaaacgctgccttatctaaaaccttggccctggatgtattgatcaggtacgctgttggtttcatgagactgagaacttcttcattaatactgttttcagtctcaggtgttacccttaaatgaagtgatatgatatccgcttctctgaacacttcttctttctctttcatggttactgcaatgcctctggagtccatagcttcctgggtcacaaacgggtcataagctatgatattcattccgattccggctgctttttctgccactaaacggccaatatgtccaagtcctatgattcccacagtcatttctctcatggcagtggtataacctgagttaacatattcctttctccagacgccctgtttcattgctgcatgggctcttgcaatatttcttgtctcagcaaacattaaaccaacagcaaaatctgaggttgcctccgcatttctgatcacatgaattaccgggatatttttttcagttgccgcatccacatctatatgctccagacccccgcggcaggttccgatgagctttagattttgagccatctcgattagttttttcgggactggacagaagtggaccagtaaaatatccgcgtcctcaatttccttatacagttcttccgggatctcctctgcatcaggcccatttgtttcaatgtttaacgcctttttctgaaactccttccggtcatctgctttccagacgatctttttaatctcagtgtcatcatttattttcaggctttctgcagcttctgccagcaattcactgctcacaatgatgtcccctgctactacgatcttcataaattcccctttcgtttttagaatatcatttgtttcaaagcttatgccgtttggccgcccgaggcctcagctgctgcgcgttctcctcccattgcattggattctaaataatcccagaccttctgtttattcttcttaaataatacgaagcacacgagataaactgctatgacagctccaatcacgattggattcatggtcaaaaatgcgtatgtaatcagtcctgcagtacagtttgacagaataaaaccgataatcaagacagtgcccgcagtcacttcataaccagccttcactgcaatatctgtaaatacagccgcccaggaagatgccattaacagctttgcacagaacacgatacatgccgcaatccaggatttaaaaatgttaccgtttgataaagaaaccggtacttccaccatatacggaagtgaaggtaaaaccattacaggaaggacaatattgccgggaagaacgaaggctaacagcaaggccaccgggatcaccagaaggcctgttgtcaatgtggctgcttctccatatcccaatgcatcatttactgcgatgataaactcccggtcctttccatattttgatttctttaatgtttttcttgagtaatccgtgatgacagtaaatcctgatgcaaataatccagcaatcttaggaaaaattgccattaccgcagaacaggtgaccgcaacgtctgcaacctgaccccatgaagtcatctcatttaaagtcgagatatttccaacaatcccaagaatcaagccaacgatcagccctacatacataggttcgcccaggaatccgattttctttttgatcgcgtccggccttaaattaatcttatctgcaccgagttttccgagtacaaaatctaaaactaagtacagcggtacatcccccatatgatgcggcgctatcattgcacagcctggatagtggtagtatgttgaccatctcttttgcacaatttcagcaagcagcaacaccaccagattgacaaaaagcataagaacaaatgccatcaccaagttccctttaatctggtataacagcgatccccacacgatgattgagtaattgttccacagatctgacggctgaaagatatctgtgatctttacaagaaagatcacgatttgaaagaccagccccaccccgataaacatcattccaatatctgtggagtaagccaccgatgcaatggcctgccatcctacatccaatgccggaagattgatgcctgtctgttcgatgagttttgttactaatgctgacaatacggtgccgaacgcgctggttataaacgccattccttttaaaccaacgccgatcagcacagccgacataaaggccttctttatcggagctttaaatattaaacatatgataaatatgatgatcggcacggttatgtagttgccgaatgtatcaaaaaacagtttcagtgtgtcccacatatttttaacctccttggtgaaatgtctacctgtatctcaatgctacagttctaatttctctacctcctgcatcaattcttcgatgaattcttcttcattgatccccacaagaaagcctgtggcatttaggatcggaactccatagctgccctccacaggacttgtataaacgatcaggtcatagcctcctccctgcatcgctccggggacaccgcccgggctgacctctgtggcttccatctcgtatcctttttcttcaaatatatctgctaattttgaagaaagcattgctgaactcactgtccctgaaccgcatactgataatactttaattgccctcataatttcccttcctttctaactctctaaagtttttaaacaataaaggatctctgatttatctttggaatccctgatcttctttaacagctctccatcttgaataatcttcatcatctgtttcagcatgttaatctgcatatccgaatctttaattaccagaggaataatcacttcacagtccagccacacatcctttgttcccattgcacagaattttacgggctctctgggaataatgacccctactgccggtttattcacatatgtattgtttgtgtgtggaatcgcaatagccactccttttccaggtagaccggtgggatatactttctctctgtctatcacagcctgtgtatatccgtctttcacataccctttttcataaaaactagttccgccaagtctaatacaatcttctgccgttttaacttcggcatccaagattacaagttcttcatctagcagtttcaaaaatcgtcacctctttccatatttagatttaaacagaatatttggttatcgataacttaacttctaagtatattttatcattggtctattccatcaaaaagagcagttttattcattttttatttcttatgttttacattttttatacctattttataaagagaacatgtcccatgccgtaatgacagatccaaacacaataagaaaccatgaagcaaggcggacatacctaagtgtttttggaattccaaatctttcgtagttatgaaaatgcataaataccagcggccacttacatagacagattcctatgacgatcaacggtatatgcgtccaccagcctttcatggagaaacccatgaatactaagttgagaacggcacagatcccaataatcacataggctttgagcctcgaggttttgtcccattttataaatctggatgttttgttataacagtccgtactgcagcattgtgcttcttctttttcccttttcatccaaacaataactggcttttttgtgatcggctgcccgcaataaatacatcttttctccatagaatcctcctttactcatttgctcctttcacagcaagcaataaatctctcccgttttcactgtcacaataattataaatctcctccagtacagggaaatgtgtattttgatctacggttacaaagaaaataaatattttcccttttatctcctcagatatctttatcctttcctttgaaacaacaatttcatagtttatctctacatttaggtctccgcgcattgggcagtgaagcactacaacatcttcggtaatctcataaaattttattttgttatggttcatcatgttacataacctactgtacagccgcttccacgcattttctccaaccgcttttttacacccctgcataagcagctgttctttgctgctgtgtgcagacagtagagaatatcttttcttttgaatatattcctcaaccgaattcaatttttggtcgatttttctgttatctacctcaaataaaatccgcagaacgttaaaatacagttcattctcatctacggtgccgcttgtgctttgggcggctgccgctataatcctctgaattgttctgtcatactcacctatcactccacaacggttcataacatggatgatctttttcttatcagcgtcctccagaacaacattggtaaacacgatattctttctctgtgccagcagctctgaataccccgtggaaatgatcagcgcaaactcatccaaatcgtattttttagcttcagaaataatacccagcttaatgtctaccgcgctgccgaacagtgtttttaactgttcttttaccagcgttgaagttgccattccgtccgcgcagagtgccaggacttttgagacattgctttttttatgaatcgtctgatacttttcatcgcttataaaatagattgtcaggtatgcgatctcatctgatgtcagcacctttgccagatcatctttcatctctttcactgctctctcagtgaaatcatatatttccggatacattctcataacatcctggaccaatggatttgtagattgaaccccatatttcaatctatagtacagcggtcttatatgcccttttaaccttgtcattaaacgggccttattatcaaaagaaatacaggcaatacgttcaaaattaacaaccaatgccttagtaaaattagatatatacaagtcctcctgatcctgagaaacaaattgtgcaacttttatacctaataaaagcgtagcaatataatatatctcggattcaggaatttctaaattgtaaacctttagtttttcaaaactgtgtttcagagactgatacggttttgtctcaaccagagtgactttctcttctgtatgaaggttcattgtataaccgtccatactcctgatccatgagatcaggatcatactgcattccagttcttcattttccagaaccagctttatattttcatcttgttcatactgtttgatcaggcatcttgcgatctccagataatcatagtcctcccctgttatggttactaaagatttctgcatccatttttttagaatatcttttggctggaaattctctaatttttttatttcctttccaacaatctttctaattgcaaactcttctccctggagcacatacccaaatttgattgaactcgcaatagcaatatcctggtctcccagaagttttttccactctttgatatccttcaagatggtattcttgctgacatcaaacaggttctgcattttctcgatcgtcacaacctcagtggaaagcagtatcatcaaaagctccaggatccttctttcctgtacagaataataatagcctccgttttttctcatctcggcctgtaacatttcgattttattagattttacacagatgattttagactgaatctccagctttcccagctccctgctttgcagccaatcattaatcagttcaaaatcatagtaaaaggttctcttggttatgtttagtttttcaataatgcggtcgacagtataaccctttttttgttctagtataatttttaaaatatacgctggcctgctttttaattccaaagaaatctactcctttaaattttgaataaaatcactgatcttctctcctgcttccttttcatcggttccgcttactacaagcttgatttttgtccctttgcagattcctcccgataaaatgctgataatacttttggaatcaacttcagtattctctgtcttgattgttatatcactctcataattccggcataatgtagataactccgttgccggtctggcatgaagccctgttttgttgttaatgatcaattccttttcgtacatgtctgctcctcctgattggttttattttatttatgtttcaattatattctctttgtatttctcagaaaatagcaattaatgtcactctattttaaaatggttgtgcaaatattgtacttaaaaatgaacattcgaaccctcagttatctttgaattagattctatttaagtttctttaagtatttgtatacataccatacacagatttttttattccagaagaaggtttagagaactttcctctggaacaaaaaaacgaatgcagcctgtgcatccgtttgtagatctattaatcattattcaattaacctataccaaaataagcatcgatcttatagatttttaatcttttatagcttcttctctgatcgttttatcatattatcaattagtttttactgttgaaactttttttcatctagaatgccgttagttcccttgatgtgtagagggactattaattcattatatgacattacgttccattatggttctattatcacatatgatgttgagctgcctgtcgaagctggtggactctaaatattccaatatgtttcaatttaacgtgatcggggaaaatcagattgactaccgcttttttctctttacattccaatatgtatctattaaaacccgctttcataaaacccacacaaaacaggcattttctaagctctttttgtcgacctcattaatattattataactccatcaaatataaacttcaattctcttcacattttagtcttttcccttattttatctacactgtcgactccccatgatttttacactatgacaggtcgacagaaacccaatgaactttttaaacatatacttcacaaaataaactataccttatcgtgcgaagcacgcccaccccaagggtataagacacgggatgccctgtgggtatgagtttttctccattgtctccagtcggctctggaaaggcctccttccgacaacggagaaaaactatcgtaggatggcaccttttgtttttataaatttcatctattctctaacgaactgtcagtaagcctgaacgaatatgtaacgtttaaagaaaacacacaaaacgtaaaatgataggagcaaaaggagccactttacgaaagttatttaccactattggaggagcgcatttcaaaagcgtgacggaaatagtggtaaataactcatacccaaaagggcatcccgtatttcataccctgtgaatatgacattttcaccagttctccggcttgctttgtcttaagtatgtaagattttctctacttggataacccctttatcttaaccatacaatcataaagcaggcccctgaatatcaatttctttttcaggggcctgctttatatcaacattttttctctaaagtttgttcaagatctctttcttatacctcaggaattccgccgtaagattaaagtcctgtctccgtggtttgggctcctggattgtgatctcgtctgtaatcttccccggttttcccgtcagtagataaatcctgtctgacagtagaatggcctcatcaatatcatgcgttataaataaggtggacagatggattttatccatgacatccagataccacctgtgcatatcgctttttgtcagtgtatcaagtgcgctgaaaggttcatccagtaaggccacatccttcgaaaacatgtatgttctaagcaaagcggctctctgtctcattcctccggaaagctgtttcggatactttttctgcgttccctcaagcccgaactcctggaaaaatgcacccaccttttgtctggcatcctttttcttctctccccggatcagcagtggcagcgccacgttgtcctcaatcgtccggtaagggagaagcagatccttctgcagcatatagctgatatgccctggctgtccggtaatgtccctgccgtttaacaaaacgttcccctgatcaggccttttaagcccggagatcacattaaacaaagtcgtttttcctccaccgcttgctcccagaaggcagaccagttcattgtcatggagttcaatcctgatgtcctcgataacattttcgtgttcatatgcaagtgtaacatctgttacaattaaatctgacattttctttactccaagtagtcattggtaaatccggtgttctccggaatctttgttttagaaagccccttttcattgatccaattataaaaggcattccatctcttaggattcatatatccccactgtttaacttctgctttgtactggtccttcatgtattcctggctcttctccaccagtttagaatccagctccggtgccgctttgcagagaatatcggctgcactcttgggatcatctatggcaaactcataacccttttttgcagctgccagaaacgccttggcagtttccggattcttcttcatccaatccttattgccgatgatgaccggagtataatagtcaaataccggatcgatatccttaaatgcaaaataatctgttttcaatcctgcaacctctgccgcaatgccggcccatccataataaatccagatggcatctaccttcttgctcttcagtgcggaaacctcatcggtcacagtgctagggatcagtttgactttgctaaaatccccatggtctttttctaccgtctgttttaaggttgccttttcaatctccagattccatgtggcatacttctttccctccaggcctttgggactgctgataccatcaccttttctggaaataatgccagatgtgttgtgctgtaaaactgccgcgacagctgtgattggcagcgcgtcatctcccacaaccgcaggcatcatgctgtcctgaaaagatatcccaaactgggctttccctgatcccaccagaacttctgctccgtcttccggcggctgtacaatctccacatccagccctgcatctttaaaatatcctttttcctttgccacataaattcctgtatgattggtattcggtgtccaatccaggacaaaggtaactttggtcaatttaccttcacttttttctgatccattttctttgctctggcagcctgtgatggacataatcataactgcagcaagcaaaactgccactattctttttttcataaaaccaacctctctattcctaatcgatcctctaactcttctcttcccacggcatacatctcttctgcagcagattcactgcccacatgagcagcaggctgattgctgatatgatgaaaatcaccgcaaacattttgtcaaaagaaaacccctttttcactcgtatcatatagactcccagaccttcaaagcctcccagccattctgagataacagcgcctactactgcataggacacggagatcctcagactcgcaaaaaactggctcaatgatcccggaaacttaacatgccggaaaatctgcagacttgtagcccccatagaacgcatgaggctgatcgtgtcctggtctgccgaacggaaaccgtcaagcagacttaccgtgatcgggaaaaaggtcacaattacaatcaggatcacctttggaagcatttcataaccaaaccacaataccaaaagaggtgcgatcgctatcgtcggtatcgtctgcgtcagtacgatcaatgggtaaaatgctttgtaaagcttatcaaaatggtccataaaaaccgccatgagaaatccaatggcaacgcccatgaacagcccggtaagagcctctatcaccgttactttcgcattgaccatcaaaagcggaaaatcactgaccaatgcctttagcacatccaatggagatggaagcagaaactttgaaaccatgccagccccgctgacaaactgccaaaccgccaatatgataagaatagccgccgcgggcagtattttactggtggtgtttcgtaacttttttatcaatggtgagtacatctccttctggcttataggatacctttacataagctgccactgacggcgctcctgccctcaccgcaatatgctggcactcttttaccacatccatcagttcatcgtaatctccttcaatggcagtttcaaacggccccacataataagaaagtcctgtacttttaatgtagtcaataacctcatccacaatacggatcaattcctcatcgttagccgcctccggcaatgtctgaatcgctacacttgcattcatctttttcatcctccttaaaaaaccccgttggataatccaacggggtaattgtcacagtttgtgctgttctattcctacgctggcattatccagatcaggtataagggttaaaggctccatttgccttactctcagccggcatgacgccagcacccctgtatattagatttttgaatgttccttgttgtctgttgctatgcttgtattataatcaatccggacaaataaatcaattatagtttgacaaacccctgctcagggattatattttaggaagtatagttcataaaggttctcaaagacgaaaactcttttgggggcctttttgtctatttatccagcttgaaaggagatttatattatgaaaacagaaacagtagaaaacatgtgcggaggaaaaggacacgttatcatcaaacatgttttaggggaaaaagagttaaacggaaaatgcggtttatacgcagaagtcattatcgaaccaggctgcaccctcggctaccatgaacaccatggcgaaagtgagacctactacatcctttcaggacagggcgattacgatgataatggcacagtccgcccggtaaaggcaggagatgtgacatttacaccggataatcacgggcatgctctggccaacacgggtgacactgatcttgtatttatggctctgattatatttgattaaaacagaacaaagtggaggataaccaaccctccactttgtcctactgtctataagctgcagttgcaacagccgctatggcctgttttctttcaccacggtaagcgcttccccatcggcaaatacggcgacatgtggatgcagctgcaggattgatgccggtacttccggagaaatcccaccgtaaagtgcatcatataatgcctgggccttctgctttccgactgccatcagaataatttttttcgcctgaaggatccccctgattcccatagaataagcttcttttggaacctcctcccgggattcaaaaaaccgagaattcgcgtcaatcgtgttttgtgtcaatttaacacaatgcgtttccggaataaaaacctcgccaggttcattaaaaccaatatgtccattggcgcccagtccaagaatctgaaggtctataccgccattctgggttatgatctcttcatactccatgcatgctttttcagagttcatctctgttccgtcaggtacaaatgtccggtttttctttatgtttacatgatcaaaaaaatgttggtacataaaatgacgataggactgttcatggcttccgtcaaggcctttatattcatctagattgatggacgtgacctttgaaaaatcaagctctcctgcctcataccactccaccagctgctcgtacacgccttctggagtagatcctgtcgccagcccaagaacagctcctggattaatgcgtatttcggcagcaatgatctctgctgcttttttacttaaatctttataatcttttccctcataaattgtcatattatactctccgccttaatccctctttatcttcactgccttattctcttccagactttgatgcactgcttctgctattaactcagcctgcagtccatcgttgccgtctgcgataaaagggatatcattctgaagacagtaaacaaaatcgttgatgggttctattccaaatccgctgggcctgccgcagttatttaaaataaaataagagttgggcgtacgctgtttctgtgtattaaacatttctactccgcggttttgggaatcaatccgaaacattgcatcctcacaaagaatctgtgttcttccgtcattatttttcgcaaaaccttccggcaggatccatgaattctccacggtccaataacaaccgttttccatttttaaaattgcctgaatggaatcataggtatcaacacctctggattttaataccttttttgttcccacagcatatacctcttccacttcacaccccatataccagcggatctggtcataacaatgcgttcccagaaagtgaacagggctggatttatctgcccagttgaaccatttcgcaggaacatcaatgatatcatccatgctcatataaccgcggatcggagcccccgtctcaggattctgaagttcatttctcacattgattgctgccgggtcccatcttttgtgatagtcaaccgctaccctcaccttatatttttctgcctcgtctatgatctttttcgcatcttcggaggatgtcgccaacggtttttccaccagaatcggttttccatggcggatggccgccagcgccggctccatatgaaatgcatccggagttgcgatggatactgcgtcaatctcttcctgatctaacatctcgtttacatcattgtatgttttaacgttatattcctgggcaattttatctgtaatctctttgtttagatcacacaccgcaacaagatttgtatttggattccaagtatatgcatttacatgattaatcccgtaaattccggctcctacaacagcgacatttaactctttcatatgtacaatctccttttgaaatatgatgaacctgttttcagcgactttaaaaaataccgatcagagcgcataatatagaaacaacaatgatcccgatgacaattttacctgttccaatctttttatatcttactaagtaaaagagcaggaataaggctgccaatgggaagattcctgggaatatcccatctaatttgtcctggatcacaacactgctgatcttcagcggagttgtcagtgtgaccatggacgctgtcatagctcccatcataaacatagccaggacattggcaccggagatcacatcctgcatcagaccggatcccatgattgtcttaatggagcttcttccctttttgtaagtcatatttgtaaagaacaccagctccacaatacaatacataacaaaaatgagtaaaaccccaagtgccagaggattgccggctgccgctaaggttgccgccgcaattttgaacagagtaccgatgatcccccagtcaaagctgtctccaagggcagctaccggtcccatcaagccagtctttaaccccgtgatcgcttctgccggcatcccatccgggttttttgccttctgctcctccatggcgatcgtcgtaccaaggatcagtcccccggctgtcacattgcagttatataacaagagatgacgttttaacgcttccgataaatcctctttctttgtataaagctttttcagaatcggcgctatgcttccgcagaatgcaattccctgcatattttcaaaattcaacggcatctcagccgacatataccaccggaacattgctttatttaaatctttttttgtcaatgccggtttttgttccgtcgtgtttagttcgttactcattttcatttacctcctccataatttctctcttctggaatacataaataaacgcaatgcagattgcaataattcctgctgtcaaagaattaatacctccaaccgcaatgaggatatatccaagaaatacatatggtattaacttttcttttccaatcatattcatgataagggcaaaccctaaagccggcaggatgcctcccgcaacctccagcccatggataacaaaggtcggaagcgcattcatcacgttcacaactacgtcctgtccaaccagattgatcacaaataccgggaggaacaataaagggattgccagaagtaccggataaagcgtcgcacatctccagatgccgtttgcgtttccattttccgcataatcattggccttcttcacaaaatacgtgttcacgacttttcttaagttagtcacaaatgatcccagcagtccgatcggcacagccaatgcgatggcggtagtagcactcatacctgacccaatagcaatagggatgacacaggtcgcggccaggcactcatcggtcggcaggttgccgcccggtgctataatacctgcaaacaccagggcgatacctccgccgatgattaaaccttgaatcggatgccccattaaaacacccgccacaaggcccacggtaaccggacttgatataaacaaaaaaccaaagtaagagaaaatcattcctctgcaccaccaatacatcacacccattatgacagcgataactatcgtattcatcttctacctcctacatctttttcttaactgagtcaaaactgagagcggagatttcaggaatcggctgaaccgtaatctctattcccatcgcatttaactcttctaatctcttcatttcctcttctgaaatcgcaaccccgctggtaatcagctttctttcgttttcaaccggagcagctcccacattcacggaaggaatttccataccgtcttgaaccgcacgataacacgtgttgatatccttgaaaatcagaaagacgctatcctttgtcttctccaggacacttcttgctttatccacggttacaatatccacagcggttcctttcggtaccgccatcttatagatatcactcataaactcgtcatttcccagcacgtcatcaactagtacgatccttcttacaggattcacttttaaccattttgctacaacctgtccatgaatcagacgataatcaattcttaccagcttaatatctgccatctttcttcctcctcgcctccattgacttgcttggacacataattccactctttcctgactcttcacattttgtaatcaattcatccattgaacttttctctctgtctgatataaattgaatcagcattggaaagttcacacctgttagtactcccacatgttctctcatggaaatctttaacgccagatttgatggagtacctccgaataagtccgtcatgatgagaactccctgaccttcatccagctctttcacatactgttccatccttttttctccaagctcaatattatctcctgggttcaaagcccatgtttcataatttgccaatgagcctgagaacatctccgcgctctttaccagttcaacgcccgtgtttccatgtgttgcaataattaatccgaccatttctcctcctttccagatctatatcgtaaggaaacttgacacttgcactctgatgtcccgcatcaatcaaccttcacttttatataaagcaacttccatgccaacttttaattttaggtaaaataaaaaagcctgtatttataaaaatggcataaatacaagctttatgattctggattttttcagatattttgaattagattatagatcatttgaatttcaagattgttaatcgacacattatactggtcttccaagacagaaaagctttcttttaagtttttcataaagctttcccgacactttagatcttgtgtcgagttatcgtccggcagcgaccctttctctaatattaagcgctctaccatcacacacatatggatataaagcatcttttttaaatcaatagggtaatgagttccctccaatatttcaagcctggtcaccgcctcttccacatcattcataattttatccgggttaaggatcgttaactggccaatcaggtttctcatggtaaaactgcggacaatattttcgataaatttatgtaccttttccttttcataatacttgccaattgtagcatagatgacctcttcaccccgtttatcaatcaattcattcaaatggatcgcaatgtagtcctccaccttcaccttactggtcgtgacaataaactgtacgttatattttcggaaaatatcacactggctgcctttcttctgcaggtcagaaaatgatacctccactacttgcagttccattccctctaaacattcctggaggagtgtcttcattttggatgcagttcccaaccctgtgatacagcataagacaatggcttttggtttctgcctgctcggcacataagatctcttagtaacatgatgggagatgattttatccataacatcctgcagatcctcgtggttcaaaattaattctcctgcctctaaagccatttccgtcgtaatattgtttacaatcccaaggtctccctccacatcatcctttaaatccttgctgatacttaacagagatcccatgtccacgaagatcaaaagacccttggatgtattcgtattctttaaatacttcttaattcttgaaacaaccttatttttcggcgtatcatacgccatatcaaaggcttcaaaaatgtaagtttcaaatacccggtttaccgtactggcaatgctggacgccgtagccggcccatgggatacaataatagcgttcgtgtattccctgtcttcttttgccacgctgtaaaaataaagcatggcaaataacctcacaaaccaaggatttgtctcatagtcgatattctgatggaccatttcattaaagatcagacccattttatagtagcgatacatcactggctgcagcttattcacaattatttcatatcgggtgtcatcaagcttctcactctgattattcagggcatataatattttaacaaacaccatttccatgatcccattatatttcaggccataattatcttgaagataaaccaagatattttcgatggcctgattatatagattttggataaaagggtcaatttcctggtaaatgacatcctctatcatctggttgatctcattatatatagtttttctgaactgaacctttgatattttcttttctaaatattcataaacggtagcagcaatcgtctctgccgggaaatagatatttacttgttctgttctcgcatttacttgaaccgccttttcatttgccagaatttcaacatcctcattcacataatggacagatccagtgtttcccataaatagctgcgtatctgataaatgtctcaagttcaccggtatcatatctgctttattttttgacttattatatgccttggcacatgacagtttgataatattgcgcagacttccgatattcccttttccctgaaacgtcaacaggtgattgataatattactgctggccagaaagtcacattccataatggatgcctcttgatgaatcaaatgaataatcaactgatatttttcttccaatgttctttcatgaaatgcaggtaacgtcacatccaccggaattcttcttaagaatgtatccagcatctgttcctttccttctgttgttgcaaaaatcagcctgacattcaatttgatattatgtccgttatctccaatcctggatactacccctttatcaatataatggaatagcttttcctgcccttccggagaaaggcggtgcacttcatccaaaaataagtatcctttgttggcttcttcaatcagcccctttgtatcactatttgccccggtaaacgctccttttttgtatccaaataatatagaagacagcaattccttattatttgcatagtctgcgcagtttaacactataaacggtgcatcctccggtatcgtatgaacatactttgcatatttataaatgtattccgccagcaggcttttccccacgccgcttggccccagcaataaaaccggcatacctctctttggatatgccgctgacaatttacacttttccactgtttctctcaaactttttccggctccgataaaggaaacgaatgggtcatcagagggcataaaatctttctcaatataagaaaacattaccggtcttgttttttctttttgaataactccttctctggcaagttcatttaaaatagcactggctgtattccgctggatcttcaggctaattgcgatttcctctgcagtctgcgcttttttgttttccatgagaagttttataattttatccttattaccctgtttccccatagtgatctctctcctcttattttaccagacgtgtcttattaatatactaacattaaagcaaagaaaaccgcaagaattatgaaagctgcacttcctttaattaaaactgtccttgttctgccttgggtagacgcgatcactccaattatgtagaacatggacgtagtgtctgctggagaaggatgatggttaaacagaaggtaccaccccacgatagtttttcttcattgtcggaaggaggcctttccagagccgactggagataatggagaaaaacttatatccacagggcacaccgtatctcatacccttcgggtagacgcgctttgcgcgataaggtataataaatgcatcaatattattttaattacaaatcggaggaaattatgggcggattttttggtgtaacttcaaaacaagactgtgtttttgatttatattttgggacggactatcattctcatcttggaacaagacgtgccggtatggcggtctacagtaaggaagatggttttgaccgggccattcacaatattgagaatgctcctttccgtacaaagtttgataaagatgtcaacaaaatgcatggctacatgggtattggatgtatttctgactatgagccgcagccattgattgtacgttcccaccatggcacctatgccattatgaccgtcggtaagatcaataatacggatgagattataaagcagatgtttgattcaggccacacgcattttctagaaatgagcggcggtgacatcaatgctacagagctggtggcagccatcattaatcagagagagcaccttgtggaaggaattcagcatgcccaggagatcatcgacggctccatgaccattgcccttcttacaccaaaagggatctatgctgcaagagataaaatgggccgtacaccggttgctgttggaaaaaaggaagacggatattgcatttcatttgaaagcttcgcatacctgaaccttggttatactgcagaccgtgaactagggcccggagaagtcgttattctgacgccggagggaatccagaccctggcgaagccaggtgaggatatgaaaatctgtaccttcctttgggtttattatggctatccatcctcatcatatgaaggaatcagtgtcgaagaaatgcgctataactgtggtaagaaactcgcacagcgagatgatgcatcaccggacaccgtggccggagttcctgattcagggatcgcccatgctattggttatgccaatgaatccggaattccattttccagaccgtttattaaatatactcctacctggccgcgttcttttatgccgaccatccagagcaaaagaaacctgatcgccaaaatgaagctgatcccggttcatgatttgattcaggataaaagccttctgttgattgatgactctattgtgagaggaacacagctgcgggaaaccacggaattcctttaccagagcggtgccaaagaagtccatatccgccctgcttgcccgccgatcttatatggatgtaaatatttgaacttctcacgctccagctccgaaatggacctgatcacacggaggatcattgagcagattgcaggggattacaaaaatgtccatctggagaagttttctaatccagatacgccggaataccagggaatgatcaatgaaatatgtgatcagttgaatttcacttcactccggtatcacaggctggatgatatgattgaatctgttgggatcgatcctgagaagctttgtacttactgctgggatgggaaagaatagagaatttttataaaaactaaagagaaacaaaaacacggaaacgatactatcattgtttccgtgttttgtttattgatctactttaataattcccttaattcttccctgctgaaacttgccgtgcttaatccttccccgccaagtatctgctccgccagttcttttttcttttcctgaagcttcataatattatcttctatcgtaccctgaacgatcagcttataaaccataaccacattttcctgtccgatcctgtgggctctgtcagtcgcctgattctgtacagccagattccaccacggatcatagtggatcacaatatctgccgaagtaagatttaatccggttccccccgcttttaaggagatacaaaaaacggaggtatcatcttgattgaatgcttcaaccatcttcgcacgtttttctttactgacagctccagtcaacgtatagaaagagatatgttcttctgtaagccgctgctctaacagtgaaagcatagatgtaaactgggaaaataacaaaatcttatgtcctccgctgactgcattccttatcaggtcaatacataactccctttttgcggactctcccttataattttcaaaaattaattcaggactacaacatatctgccttaaccttgtcaattctgataatatttgaattttcctggtttggaattcttcctctgtctgcttattcaacatgatctgcatgcgtttcacatgtgcatcataaagcttctgctgctccccttccatcttcgcaaaataacttttctccagtttatccggcagatcttttaaaacatccttcttcagacggcgcagtacaaaaggccggatcattttctgtagcctctttatctcagtttcactgttatcctgtatgatcggaagttccaactcctctctgaattttttataagaatataagaagcctggcattaagaagtcaaagatgctccacaattcgcttaagcggttttccaccggtgtacccgtaagtgccagtttaaaacctgcatttacagcttttactgcctttgcggcctgggttccatggtttttaatatattgtgcttcgtcaatgatctgattgccaaatgtgatatcctgataactatcgatatcccttttcaaaaggtcataggatgtgatcaaaactatattgtcactggcattttttataatctctttcctctcccccgcctttccaactaccatctgtaccggtagaccgggtgcaaacctgcagatctcactgtgccagttaaacacgagagacgcaggagccacgatcaggctccttctattttcttttccttcctgatactcagattccaaaaaggcaatcacttgaagtgtctttccaagccccatatcatccgcaagaatacctccgaatccattacattttaatgtcttgatccacaaaaaaccttttttctggtactccctcagtacatcctgaagcccggccggaatctcaaagtcattatcctctactgtcttcatattccggatcaatgctttaaactctttattcttctgggcggaaacagtctgccattcttttagctcctcatccagataaatggcattgtatttgggcagagtcactttatcctttttaaactgccggtccgaaagatgcagcccctccttcaactccagcagcgcgttgattccttccccgtccatatttacaaaatcaccgcttttcaggcgatagaacttctttttcttattataccttgataagatctccaaaagctcatccttaggcatatctcctgctgtcatcttaagctccagcatatctcctgagagagatacacccactacaacttttggtgcaggagaaacatgaatcttctttaacgcatcagaaatatagacctctcccagcctctgtagattggaaatcccgtatactaacagttcgtacaacttttcttcatcatctgccagaaccataagcttttcccgttcatcgtaagcattacaatatcctgagacgactttagccacttccatctctctcttcagatcccgtctttcaatttcctgggtgttgtcataaatgttatatttcctttgtccatagactgccataggcttgcaggtaataaagtctttctgcggtgcatccagatatatttcaaaagctacaggaaccacaccgtagtcttcttcctcaaactcctgctttgtacattcaaaaaatttttccaacaccggaagcagttctctgcaaaaggcaggtacatccgactgttctataaatgctctgcgcgtaggaagctccgccatacaggataaaaaaccttgtatgggctctatatcctcttttggaattctatatacttttcctctttgaaaataaatattagaattgacacactgatagcctgttaaataattgatctctacgtcaattccctgttctctcccagtgatcttcatagaacgttccagcggctcgtctgtcaccctccacacgctttcctgtgctctgctgatatccgcctgaaactccttgacccctatggcctcgatgagctgctccagatctcctgttttcaacggcactcttctcaaattaaccgttgtgaaatctgtgtatggatcatcataatagggaatctcaagaaaattatatttgttctgttttacccagttttccaaaaacaccacaagcttacgggaatcctcatcaaatactttcatgtcatgtacaaactgcagcttttgtccataagaatagttttctttcttttccacagcgtccacaaaggcgaacacatcttttaagacatacatataggaagtccctattttaaattccacctcaatcatgtaatcctgacatattaaaaatggttcaagccgcacttgtccataaagctcctcctggatcataggcagtgtattctgtaactgctgccttgaaagcagctgttttatcgccggagttgtctttggcttgtattcgatttccgccgatgctggctttgtgttcattcccttcatgccttgaagtttctcaaggatgcttttctgcttgtgactgtattccaggatagtttcttgtctttctacatagtctctatattccaacagcaccgctacacaatgtttgcaaaggccatagtactcacggaatgccgggcactcacaatatgcattttccagatcgtcaatttctaaattatattcaagattaacctcatatttatttcttccgcttccctgtataattgcatcaatatatgcgatcccatcctgttcaccaactgaaaaattcagtatatagtcagactggtacagatttctgccttttgcataagaagatggatttgacaattcctttatctgtgatttagttaacatcctgctgtgccgccctttcctactgaatttagaagtaatatgtttgtttatatgaaaaattattttgtgaaacaaatgattttagattacttgtcataatacatagagaaggctgaattcattttttaattatacaaaaagctttcggacaagatgtaagttaaaatatagtccgaaaacaattcatatttacattaaattaaatgctctaacttaaagaaattatacttacataagtc

SEQ ID NO: 24 - DNA, 56471 bp, Anaerostipes rhamnosivorans
gaattaaaatatacaagattaaaaggatattttatcaaaggaaatgaatttgaaattcgcaaaattttaatagaactagtaaatctaattttaaatataccttatggaaaatatatggtcgaacgtattactaaagttacaaatggagaacttcaaaaagtcacagattggctggaggccattgaaagagatttaaaaatttcttatacagatgacaagatggagacaacgccttatacagtggcattgatatacagaagaattgaatttgggcactacattcaagaagacgatatgatctttcaagaattatcagacacgaaagaatatgcatttgccgagagattgttatcttctattggaaaagtaccaaggcaagaacgtttttttataacattacaattactatcgactaatttggttggagaatctgttttatcagaaaatcaaatgcaaaaaatgaatcaagcagtgaaagaagttattttaaagtttgaaaatcgggcttgtattatgtttcaagatcgagatcggttagtgcaaatgttagtgcaacatatgaagccggcatattacagaataaaatataatctgacattaacaaccaacttgttagatctggtaaaaatagaaatgattgaggaagaactacaggaaatttatttattgctgaaacaatgtatggaacctatagagagactggtagaatgtaagatcccggaaattgaaatgcaatttatcacaatgttcgttgcaagctggttcagaaaagagggacagaaattagtagaaaaacctcgtgcgttggttgtatgtcctaatggaattacagtgtcaaaagtaatgcacagctcattaaaagttttatttcctgaatttgattttcttaaatctatttcagtaagagaatttgaagaaatggatgatagtacatatgacctgattttttcaccagttcgattaaacacaacaaaaaaaatttttattgtggagccagtgattacagtaagtgataaaaagacgttacgaaaaaaagtgctggaaaatgtatatggaattaaaatggtcgattatgatgtagatgaagtatacaagataatgaaaaagcacgtgaaaagcggcataagcttcaatcaagaaaaaaatataaaaagagaattaaagaattacttttctattaagattgatgataacgttgagcaaaaaaatgattgcgaagatatcaatttaacagatttaattcatcaaaattatattcaaataaagaaacaggtttcaagctggaaagaggcaatggagattgtagcacaacctctattagactacggacatgttacaccagagtatgtagatcgagttatccgccaatacaatgatctatcaatccatatcatttttggcgggaagattgcagttcctcatggaatgcctgattttggcgtaaatgaattagggatgtccatgttagtaataaatgacccagtgaaatttggaggattggatgtccatgtatttatgatgttagcgcctgaagatgagaaaagacatctaaaagcaatgctgcagatgacaagccttgcagcagatgaaaacggaattagaagattagttgaagcaaatgacaaaaaagagatcatagaagtattaaagcaatatcaataattggtaacgattcgttgacgaattgaatggatgacgatccatatatataacaacaaacaaataacaaggagaaagaaatgaaaagaattgtttattatggtattcaggatattagattagaagaagcagaaattcctacaccaggtcctggagaggttgtagtcaaaaacaaagttacattaacctgcgggactgattgtaaaatgtttatgcggggatatcgttatcagccgccacatttaattggtcatgaggcatctggagatgttgttgcagtaggtgaaggtgtgacaaattttaaaatcggggatagagtagtggctcacaatacagcgccttgccataagtgctattggtgtaaaaagggacaacattcaatgtgtactgacctgccatcaaatctaggtgcatatggagagtatcagctaattccaaaaaatattgtgaatgagacaatgtttaaattaccagatgatatggaatataagcaggcagctttgacagaacctctttcatgcgcggtctatgggatttcaaatgtcacaattgaattaggagatacagttgttgtgaatggatgcgggccaattggacttatgtttatccgattagcatatctaagaggagccagagttattgcatgtgacagacaggaaaatagactggccctggcagcaaaattaggtgcagctgagacgattaatattgatgagaaagatcagattcaggcggttagagacttaacagaagatagcaggggcgtagatgtagccattgaagcagcaggattgccgcaggtatgggaaattgcatttagacaagttagagcaggcggacaagtattgtgcttcggaggaactaaaaaagatacaacggtaaatattgattgcacaaggatgcattacgaacaaattacgatcaaaggtgtattccatacgacgccccaacatgtaaatgctgcatttgagttgttaaaaatgggagcaattcaggcagaagattttgtagaacatgaatataaaatcgaagacacagaagcggcaattagagaacatgcagctggaaaagtaattaaaaactgtattgtttatgatgactgataaggagacattatatgtcgatatctaaaaacctagtaagaaaagaatatatttacgagaatcttactgtaaaagatcaagaagaagcgttcgatgtcatgggaggaaggcttgtaaaagatggaattacaaaaaagagttatgtacaggcattaaaagatcgggagaaaaactttccaactggtctggctacatcaggaattgtaattgcaatgccgcacacggacagcaaccatgtaaatgaagcatgtattacgatcgcacggttaaaagatcccattacatttcatgaaatgggaaacaaaaacaatcttctgaatgtagaaatgatttttatgcttgcgctaaatgaccctacaatgcatttggaaatgcttcaaaagattattggaatgtttagcaacaaagaaattttaagtctattaaaagaagcaaaaacatcagaggaaatatataacgtagttgttaaagcaactgatgtttcactgaaaggagataaattatgaagacaatcgttgtagcatgtggaggcggtgtcgcaacttcccagacttgcgcggtaaaactggcagacttattagaagagcacggaatcagcagaagtgattttcaaattgaagctattaacattaattcaatgccccaatatgaaaaagttgctgacatatatgtatcaatttgtggaactgaggatgcaacgtatgatttaccgacgttcagcggtgttccatttattacaggtatgggagctgaggaggaattagaaaaaatattagaggaattaaaaaaataaataggaggaaaaactatgggtttattacaagctttttttcagggcttaattgatttaggtgcaagtgtatttctgcctattattgtaacattgattggaattgttttaggaatgaagccggtaaaagcgctttcagcaggtttaactttaggtgtcgcattagtcggaatgaaccatgtcatggcgttaatgacagattctgtaggtgccgccgcccaggcatttgtaaataatacaggtgttcaattaaaggcactggatatgggatgggcaccagcactcagcctttgctggacatggcaatatgcattcttaatgttcccggtacagatcgtgatcaatattattttgctggttgtaggatttacaacttgcctgaatgtagatatgtggaatgtcggcaataaggtatgtacagcgtttttggtagcttatgtatctggaagtacggtactcggttttgcatgtgcagtgattcagattgtctttgaattgaaaaacgcggattgcacaagatatcgtcttcaaaaattatcaggtattcccggaatttcaatgccgcatccaatgtttttagcaggaatttattattatccattgactcatttgttggataaaattgttccagatacattaaacattgacgcaaaaaaagtaagagataagattggaatttttggagaaaaccatatcatgggattcattgtcggctgctttattggaatctttggcggatatggatatcagaaagtattacaattaggggtccaggcaggatgcgctctgacattattcccaatggtcgcaaagctatttacaacagcgcttacacctgttagcagcgcagcaacagaatttatgaagaaaagatttcacggaaagaacattacaattggaatggactggccggtaatggcaggccgttcggagcattggttattaatgatcttagcaattccggtgatctttatctatgccatcttcttacctggaaatattgtattaccgtttggcggattaatggatatttgtcttattgttccattattttatctgacaatggggaatatgttgaaaatggcgatcggaaccttaattggaattccaattcatttatatgtggcatcctattttgcgcctcatttcacaaaattggcacaggtaacgggaggcgccgcggttccaaaaggtcagatgttagcatggtttggaatggatatttcagaattaagatgggtattttcagcggcatcagagaaaaatatcatcgcaattgtatttttagtaattacaatcccgttagcaatttactattttaaatcaataaaaaaagaagatttacagtacgcaaaagaattgggaattgatgtagaagcataaagctggagggatcatttatgcatgagaagaagttaaagaaaatagcctttgttatattgacattaatggatgcattatttttggtgattagtgttttgaactgggatatgatgttgagtatctgctgttttgtcttggctatattgcttacatacttatatgaagatgtcggattcggagaattctattatgggaaaagaatgagaaaagaatatagagaagcaaaaagagcagctagaaaagaaaaaaagtaaggagaccggaaatgaaaaaaattataaatgatccactatcagttgttgatgaaagtgtagaagggcttctatatgcatatggcgatttttatgaaaaggtccctgaagtaaacgggatcatattaaaagagaaaaagaaaaaagtcagcatcatttcaggcggaggaagtggtcacgagcctatgctatccggacttgttggagagggtatgttaactggggcagcgatgggaagcgtatttgcttccccggaccctaatacaatttcaaaaaccataatttctgcagaccaaggagaaggtgtgctctgccttgtatggaattatgcaggagatacgatgaattttatggttgctcaagatttagcaatggcagctggaactgcagttgaacaggtcatcataaatgatgatgttgcatctgcacctagaaatgacaaagatggccgacggggagttgccggaatgttgtttgttgcaaaaatagctggggcagcagcagatttagggtattcattacaagaggtaaaggaaatcgcccaaagggcaaatgataaccttcggtctatcggagttgcgctgacaccatgctctattccagggaacccgcctaattttaatattggagacaatgagtttgaatatgggatgggaatccatggagaggctggagtgaaacgagaaaaaatgaaaactgcagataacattgtggaagaaatgttggcagatatcataaatgattttggctctcttgaaaataaagaagtcctggtacttgtcaatggaatggcggcaacgactagtttagaattaaatatcatgaaccgaaaactcaatcatattttaaaggagaaaaacgttcaggtgtatgacaatgtaataggttcattttgtacatcgttagaaatggcgggtgcttctatctcaatcatgatgttagatgaagagttgaaaaagctatataatcagcctgcatatacgccatgctattatcacagggggaaataaagaggtgacaatcatgaaggaattgactgtagaacaaacaaaagagatgatgttttctgttgcggataaaatgatagaaagcaaagcaatgttgtgtgagattgacggaaatattggagatggagatcatggacttggcatcgaaagaggctttacgtctgtgaaacaatttctgcaagataaaaatcctgaaactatatacgacattttcacaggagcagggatggcaatgatgaattccatgggtggagcatcaggggttattttttcagcaatttttatggggatcgcacagcagccgaaagaagataccttaagcctagatgcatttattggtatgtgtgaaagtggactgaaaaaaatcaaagttgtcgggaaagcaaagaaaggcgacaaaactatgattgatgctttagagccagcggtggaggccatgaaaaaagcaccgaaggattgcggattcccggaattattacacattgcttatgagtcggcgctgcaaggtgttgaagattccaaagggtatatcgcgaaattcggaagagcaaaattcttaggagagagagcgcttggacatgaggatgcaggggctgtttcagtttcaattatttttaaatcaatgagtgaatatgctgcaactgtataggtgaggagaaacatgcgatgaatattttgaaaaatccattttttgaagaagcgatcgatgcttgtaggtatttctgggaagctggatggggcgagaaccatgctggaaaccttacatatttattatctgacgaacaagttcaggagataaaagaggacgaagatgtaaaaaaacagcaccaacacaaattgctatgacatttgaagcgaaagagttaattggaaagtactttttagtgacaagagcaggagcatttttcaggacaattcataaacatccagaaaaagatttaggaattgttaaagtaaacgaggatagtgtagatattatttggggatttgaaaatgggaccatgagaccgacaagtgagttccctgcacatttattatgtcatcaggcaaggctgaaacaaaatccagagaatcgattggttatgcattgtcatccgacacatacaatcgcaatgacgtttgctcatgaaattgatgaggagaaattcacaagaactatgtggagcttaaattcggaatgtgtactagtcttcccggaaggattgggtatgctgccgtggatggtatgtggagaaggtgcgatcggaccagaaactgcaagaaaaatggaaaagtatcgaattgtaatttggccttaccatggaatgtttgcaagtggcacatcttttgaagatacaattggtttaatagagactgttgagaaaaacgcgcaggtatatatgttaaatggcggaaatataaaaaacggtttaacagaagatcaggtaaaggaattagcccaggtatttggtctatgggattgatctcctttgatcacaactttaaatatcagattaagcagcgagactgtttgaagttttatgaatgggcagagccgatttttcggtatctgcccatatttgtatgatacaggaactttctgtctatcagcaatcgctatggtctttacagacttttgtttcttttatattctttagatacatcatatgtatatattgacattagacatcatatgatttataatacaacaaacaagaggtatgatgtctaatgttaaaaggaggctatgattatgagaagtgaccgtattaagaaaggtgatacgaaagccccccagcgttctctgctgtacgcgctgggacttacggaggaagagatggagagaccgttgatcggaattgtcagttcaaagaatgagattgttccgggacaccggaacctggataagatcgaagaggcggtaaaacagggagttgccctggcaggaggcgtgccgattgtatttccggcgatagcagtctgtgacggcattgccatgggccatgagggaatgaagtattccctggttacaagagaactgatcgcggattccacggaggccatggcctgctcccatccgtttgacggattggttatgatccctaactgcgataaaaatgttccggggcttttaatggcggcggcccggctggatattccttctatttttgtgagcggcggccccatgctggcgggaacgatggatcggcaccggatcagctattctactgtatccgaagcagtgagcagacatcagacaggggagatcacgggagaagaactgaaaacttgtgaacagaaggcctgccctacctgcggttcctgttcaggtatgtttaccgccaacagtatgaactgtctgacggaagtgctgggaatggggctgccgggaaacgggaccataccggccgtttactcggaaaggatcaggctggcaaaaaaagcgggcatgcagatcatggagctggtagaaaaagatgtgaaaccttcagatcttatgacgaagaaagtctttgaaaatgccctggctgtggatatggctctggggtgcagcacaaacagtatgctccatctgccggcggttgcccatgagtgcgggattcatctggatctggctatggcaaatgacatctctgagaaggtaccgaacctgtgtcacttggcgcctgccggggaagcttatatagaagatctgaatgaagccgggggaatcccggcggtcatgcatgagttaaacaaactgggcctgatccatacagatccgctcacctgtaccatgaagacggttgaggaaaatatcagaggaaaagagatcaagaataccgatattatccggacggtggatgacccgtacagcaggaccgggggaattgcggtattgaaagggaatcttgcaccggatggctgcgtggtcaaaaggtccgcggtggcggaagaaatgctgcaccacaagggcagggccagggtcttcgacggggaggaagatgctctcaaagctatttactcaggtattgttgtacctggagatgtggtagtcatacgatatgaaggtcccaaagggggaccgggtatgagagaaatgctgaatcccacatctgccattatgggcagcggtttgggagacagtgtggcattgatcacggacggacgattttccggagctacaagaggcgctgccatcggccatgtgtcaccggaagcggcggtgggaggaaccatcgcgcttgtacaggagggagatctgatcgaaatcgatatcccaaaccatacggtccagctgctggcagatgaaaatgagatcaaaaaacgaaaagctgcctgggtgccaaaagaacaaaagattcaaaaagggtatctgaaaaggtatgcaagaagtgtgacttcgggcagcagcggagcagtattagattaataaatttggaaaagaaaaagatgacagaggttttttggaacttctgtcatcttttttgcgctacttaaaagagatagttaacgatagttcgttagcgacattaaccaaaagaaacaggaaaatcaggttcattctaaatttaattttggttaaatcgtggaaaagagattagttcgcatggaatctattgaaaaccaattgacagctggaaatgattcttgtatgatgcaattgtaattaaagaacagtgttccggataacggaacaaaagaaaggaggcagtatgaaaacgttagtttattccgggccagagaaggtggaagtgcaggaaagacccccggcagaactaaaagaagggcaggtccgcatcaaggtacgttactgcggaatctgcggttctgacattgggatctttgcaggcaaacatccaagagcaaaggcgccgctggtgctggggcatgaatttgtcgggaccattgaggagatcaagggcggtagcagcaaatttaaggtgggtgaccgggtggcaccatacccgcttttatcctgcggggaatgttttgcctgccgcactggcattccgcatgtgtgcagatcattgaagctgatcgggattgatacggacggagggatcgcagagtatgtaaactgtgatgaggatgtgctgtttaagcttgatgatggtctctctgaccgagcagcggcagtgatagaaccgctggcggtcatcatcaggaccatgcaccaggcagattttcagatgcttgatacagcagcagtcatcggggccggacccatcggagtgctgacaggaatcgtactgaaaaacgcgggtgcctccaggatcatcatttccgatgtagaccgggagcggttaaagatctgcagggatttcggttttgagacggtgaatgttctggatcaggacctggcagagtatgtggcgctgcagaccggcggaaccggtgtggatgttgtgtttgaatgcagcggctctgcaccggcggcagggcagatgacagagatctgcaggatcggcgggaagatctgtctgacgggagtacataaggagccccatgcggtgaaccttcaggacgtaaatttcaaggaacagaccttggtgggaagccgtgtatatacaaaaagagagtttggacaagcggtgcaatatgccggacggatagcggatgatttagaaagggtcgtcactcacatagtggatcttaaaaatgcagatactgtatttgagctgatccgtgatccgcaggagagtacattgaaggttctggtggactgcagcgtggagaacgaagattgaagtcaggaggatgaaagatgaagaaattatcagatgcgacgttactgccccagtcaggcatcaggcggatgtttgatctggcgaaaaacaaagaggacaccatcagctttgttttgggagaaccggattttgatacaccgaagaatgtcatcaaggcggcccagaaagcactggaagaaggacagactcattacacggacaatgcaggcatcctgccgctgagacaggccatagcaagagagacaaaaaagtatgaccatgtggcatacaatccggaaaatgagatccttgtgtgtacaggcggaatggaggcgctgtacctaagtatggcaacgcttctggacccgggggacgaggtgctcatttctgatccatgctacgcaaattactacggacagatcagtatgaaccacggggtacctgtaccggttcctgtatatgaggagaatggttttaactttacctatgaagcactgtctgaggctgtcacggataaaacaaaggtcatcttgctgaattcgccctgcaatcccacaggagctgtggcaggccggaaggtcatggaagatattgcgaaagtagcactggagcacgacctgtatgtggtttacgacgccgtatacaaacacctgttgtatgaaggcgagtatgtaaacatcgcagccctggacggcatgaagaacaggaccatttatattgactcctgttcaaagacctatgcaatgacaggatggagaatcggatatctggcagggccggcggagatcgtgagcctgatgcccaagcttcaggaaaacgttccgtcctgtgtcacaacctttgcgcagtacggtgcggtggaggccatcaacaacgggcaggcatccataaaggaaatgtatgaccagtatgcagagagaagaaaggtacttctggaatgcattgaaaagatcggaaagatctcgtgcagacctcccaaaggagccttttatgcctttatcaacatcaaggagacaggactcggctccacagaatttgcggaacagctgcttgaaaaagagggagttgtggtagcgccgggatctgcctttggagaacagggtgagggttacatcaggatttcctatgcgacctcagtggagacaataaggaaaggaatggaacggattcagaagtttgtagagagtttataaccagggaaggaggatattaatctcaggattaatagcaatcgtatgaaaaatgaatcaaatacacagttaaaaagaagccttggactgagtaccgttatgctgtctgtcatcggtatggtcatcggctccggagtgttcttcaagcctcaggcggtctatacgatcacaggaggtgcgcccggcatcggactgctgatctgggtgttcgcaggactgattacactgtttggaggattgaccacggcagagcttgcggcatccattcctaaaacaggagggctggtgtcctgggttgagaaatgctttggacagggcctcggatacctgctgggctggtgtgagtcggtggtcttttggccagcgaacgtaggggccttgggaacgattttttccatccaggcattaaagctcattggagtggacagcaaatttacgatcccgtttgcaatctttatggtgtttttcctgatcgtatgtaactgcctgggagcaaatgtgggaggaatgatcggaaacgtgtttacagtcgcgaagcttgtgccgctggccgtgatcattctcatggcattcacctccacgcagagcagtccggaaaatttgacaccgtttatccacacgggggattcgttcatagcgatctttgcaactggaatgttgacctgtatgtatgcctatgacggatggattcacgttggaaatgctgccggggaaatgaagaatccgaaaaaggatcttccgaaagccatcgtgctgggattgagcattgtcatcctcgtatacgcagtcatcaacatcggataccttctcgtgataccggcagaccagctggccaacacagcgacaccggcagcggatgttgcagctaaacttctgggcggaaacatgggagctaaactcatcactgtgggaatcctgattgcggtattcggtactctaaacagcaatattatgatgggaatgaggattccatacgccatgggtgtgcagaataagctgccattcagcaagcagtttgcctatcttcatcccaaatatgcgactccggtagtcagcggtatcttcttattggcagtcacatcagtgatgatcatttcagggtcctataattcgctcactgatatgtgtatgtttgtcatctggattttctataccatcgccttttatggagtgatcaagttgaggaaggatgaaccggacctgaaacggccatacaagacgccatgttacccattggttccgattctggctattttaggcggactgtttgtagtaatcatcaccgttttcacccagccggtcaacgcattagtaggcgtagggctgacgctcctggggcttccgatctatctgtccagaaaggataagtttaaggatctgagccatttggatgaggagaatgaggggacatcagatactgactgattcatgtgacgggcccgcagattgtggtataatagctgtaatagacaagactcaggaggatattatggcgaaagaaacagtacagtctgtagagcgggcatttcagatcatagaattgatggcaagaaatgaaacaatgggcatccgggagattcatcatgagacgggacttaccgtgactgtggtccacaggatcatgaatacgctggtggaactcggatatgcaaagcaggaaaaggaaacagaaaagtattttctaacttaccggttgcttgtaatgggcaactatgtgcaggagagaaacaatgtcattcgtttggtgcatccttatttgaagcagctttcagatgaatgtaaagagaccgtgcattttgttcagagagcgggaaataagatccgttatatcgacaaagtgcttccagcggcaaatatttttgccacagggtcctacatagggctggaacttgaaatgtctagtacagcagtgggcaaggcgatccttgcggagcttccggaggaggaagtccgggagatctgggatcagagcgacaatatcatctttacgcccaagacgatccagaatctggagcagcttttaaaagagctggaacaggcaagggagacagggtttgcctacgactgggaagaacgggaagcaggtttgttttgtgtcggcacgagcattccggattataagggaacttataattatgggatcagcatatcagcgccgatcaccagggcagaggaagagaatttgaaccggatccaggaaagacttcgggagacaaagcggaccgtgtcagagctgattagcggaaaataagaataaggtgctgtagaaactgcggcactctgcacctttcggatgtaaatatcatgtagataagtagaataatgtgtgtcttacatgcgggaggagacaatatggaatattttgatttgactggaaaacgtgccatcgtaaccggggcggcaggaggcctctgtcttggaatggcagaagggcttatggaggcgggagcttctgtgtgtatcatagatattaatccgaaggctgaagaaaccacccttaaaatgagggaaaagggattcaaatgcagctatgtgatcgcaaatatcgcagatgaaaaggaaagggaacaggcatttttagaggccgtaaaggaacttggaggcacgctggacattatcgtcaatggagcgggagtccagagacgccataatagtgaggattttcctctgaaggactggaattttgtactggatgtgaatctgactgcggtgttcagtctgtgccagatggcggcgaagcagtttatagcacagcagacgaagggaaagatcatcaacatcgcatccatgctctcctttttcggaggatatacggtgccggcttatgccgcttcaaagggggcagtcgcgcagatcacgaaagcgttctgtaatgaatgggcgtcaaaggatatcaatgtcaacgctctggcaccgggttatatggccacagagatgaatacggcactactggatcccaagaacccgaggaacaaagagataacagacaggatcccggcccacaggtggggaaccggggaggatatgaagggaccgtgtgtgtttctggcatcttctgcatctgattatctgaacggcgcagtgatccccgtagacggtggatacctggtgagatagaaaaggaggcacggcatgaaggtgattatcacagactgtgatcatgaaaacattgatatcgaaacgaaggtccttaacgaagcgggaattgaatttgagcttaagtgtgctaggacggaagaggaagtcatagagcagtgcggcggggcggacatttttatagtccagtatgcgagaatttcagaaaaggtcatggaagccctgccagagctaaaatacgtggtgcggtacggtgtcggtgtggacactgtggatgtggaagctgcagaaagacacggagtgcaggtggggaatgttcccgattacggcatgaatgaggtagcggaccacgcattggctatgatgcttatgttgcttaggaaagtgtacatgatggaccgctttacgaaatcctttggctgggattatacaaaggctatcccggtccaccgcttttgtgaacagaccgtaggggttgcgggtatggggcggattggccggaatttcgcaaaaaaagcgtcggccattgggttccgtgtgatcggatatgacccacagatgaaacagggggaccggatcggggaagcggagatcgtaagctttgaggacttggtgagccagtccgatgccatttccctgcactgtccggcagacggaaacagggatctgtttgactggaaagtatttgagcagatgaaggattcagcggtgctcataaatgcagccaggggaggcattatcaacgaacaggatctggacaaggcactgagggaagggattattgggggagcggcccttgactgtatgaactcagagcctatggctccggactcaccgatctttgaaaacgagaatctgatcgtgacaccgcatatggcctggtactctgaggaggccgccatggagctgaaacgtaaggtcgcaaaagagtctgtccggttcgcgcaaggattaccgattcattatccggtgaaccggcttgaagggggcagatattatgaatgacttgctgtgtaagattgaggacatcgggattgttccggtcctttgcctgaaggatgcagacaaggcagagccgctggcaaaggcactgtgtgaaggagggattccgtgtgcggaggttacattccgcaccggggcctgtgtggaatccatcaaacggatgacggaagcctacccgcagatgctcgtaggagcgggaacggtgacaaaaaaggagcaggcagagcaggcggtgagggcgggggctaagtttatcgtaagccctggctttaatccggagatagtaggatactgtacagatcataagatcacggtcattcccggctgttcaagtcccacagatgtggagcaggctatggagtatggactaaggctggtgaaattcttccctgcagaggcagccggaggggtaaagatgctgaaagccctttcaggtccttatgcaggcatgaagtttatgcccaccggggggatcaccgaagagaatatgaaggattatctgaagcttactcaggtagccgcctgcgggggatcctttatggcgccggagaagctggtggataagggggatttcatatctatcagggctatggctgaaaaagctgtcagaaggatgctgggctttgagcttgcccatgtggggatcaacaccgaaagcagagacgaggccgccaaggctgccggaatgtttgagagtatctttgggttccagaaaagtgaaaatgataattccatttttgcgggcagttatattgaagctatgaaacagccttttttaggaaacaaagggcacattgcagtgaggaccaacgatgtaggacgggctgtcgggtattttaagagacggggatttgcgttccgggacgaaagtgccagctataagacagacggatcgctgggtgccatatatttcaggcaggagatcgggggattcgcagtccatctggtgcaaaaatagatgaggtgatgagatgggaaaaataatgacatttggggagatcatgctgagactgtcccctccgggaaaccagagatttatccaggcctcttcctttgacgttacctatgggggaacagaggcaaacattgcggtgggcctttcaaactacgggcatgaggtccgttatgtgacaaaactgcccgcaaatgccatcggtgactgtgcggcagccacgctgagaaagtccggtgtggactgttccggcatccaattcggcggacaaaggctgggcacgtattttttggaaaacggggtttccgtaaggccttccagcgttgtgtatgacagggcaggctctgctatggcggaggcagatccttcagactttgactgggaccggattatgggagacacagagtggttccatacgtctgggatcactccggtgattagtaaaaatgcggcccagattactttggaggcgctgaaggctgcaaaaaaaagagggatcagaacatcctttgacttaaactaccgggctaagctttggacaaaggataagacagaaaagcaaagcattatgcgggagctgatgaaatatgtggatatctgttttggaaatgccagggacgccgcgctggtgcttggctatgaggaagacggactggactttatcaacggagattatcaggtctgcgtggatgaggaacgtatgcagaatgtgagaaagacttatggatttacttatctggtcagctcgctgagggaaagcatctccgcctctgacaaccggtatggcgcagaggtggctggtgattctggtctttaccggggaaggcggtatatggtgcatattgtggaccgggtaggatcaggagatgcgtttgccgcaggctttatccacgggatcatggaaggctgggcaccggaaaaggcgctggagtttgccactgcatctgcggcggtgaagcacaccattccgggggatatgaactatgtgagtactgaggagatagaagccctggcagaaagcggcggggccggcagagttgtgagatgatataatgaagataaagaagggccagacatgagggtgtctggccttttttgttccataggaaagttctccctatggaacaaaaaagccctgcgggcattatgcacacaaatgcgtgaggaaatcatttgactgcgtcaaatcgcatttggcgcgcaaagttgccaagcccctcaaagagtgaggggttgggatgttgaagtgggcttgcccactttgttccagttggatcaaatatcaaaggtctcaaggccctcaaactgcatcttataatattttgcgtaaataccatcctgttttagaagctctctgtgggagccacgttcctggatggtatggctgtcaatgacaaggatctcatcggcatgcttgatcgtagacagccgatgggcgatggtcacggtagttctgtttttggacagttcctccaggcttttttgaatatggcgctcactttcattgtccagggcactggtggcttcatccaggatcaagatcggcgggttctttaagaagacccgggcgatggatatgcgctgtttctggcctccggacagacgggttccccgctcccctacaaacgtatcatatccgtcaggcagatccatgataaagtcatggatattggctttcttagcggcttctatgatttcctccatgccagcctcaggattgccataagcaatgttttcccgtacacttcctccgaacagatagacgtcctgctggacgatacctatggaatttctgaggctcttaagagttatgttccgaatgtcctgtcccccgatggaaatggtgccctggctcacatcataaaaccgaggcagcagagagcagattgttgttttccctccgccggacgggcccactaaggctacggattttccggcctcaatttcaaaggagatatggtttagcaccacttcattatcctcatagctgaagctgacatcctcataggagatgtttccggccggattattgatcggtgccgcatctgtaaggtccacgatctccggttctgtctcaatgatatcctggaatctccggaaaccggacagccctttctgcatcatctcagtcagttccacaagaatctggatgggactgataaaaataccgatatacaaagcgtacatagccagatccgcagcagtcatttctccggcagcgatgaagcagccgccggccacaagagtcaccagatacatcaggccttggaagaaagtattgcctccctgaaaggttcccatggccctgtagttgtcctgcttggaccgcagaaaaccttcattaccctggtgaaacttttcccgttcgatgtcctcgttggcaaaagactggacaatccggatccctgcaagagaatcctgcagtgtggcgttgatgttccctatctttttccggttatccagaaaggtggcctgcatccgtttgttctggagtgccgaaaagaaaatcatgaaaatgaccacagcgcataagatcagcgccagcttccactggatcataaacaggaagataaaggagccgatgatctttacaacagaaataaatagattttccgggccgtgatgggcaaactccgagatgtcaaacagatcggagacaagccggctcatcatctgtccggtgttatttttgtcatagtaggaaaaagagagattttcatagtgttcaaacagctctcttctcatgtcccgttccatccgggcgcccatgatatgtccctggcagctgacataatacttgcacagggcctgcaggatgtagaagatcaggaggatggctccgatgataaaaatattcttcaggataatggaactttcctctaaaaacaaagtgtttgtcagcgtgcgcagtatctgcggatatgccagatccacaatactgataaaggcggcacagaacagatcaaaaaagaaaacagccttgtaggggccgtaatatttgataaattttttaaacgtatccatggtttaggactccattctaatatagaaagtaaaagtgtcagtaaagattctaacacaaggaaaaaaatatgtaaataagacaatgtaaaatgtacttgacattacatgtaaagtaaactatactcaagatgtaaagcaaactatacaaaaaagggcgtgacgtatgaaaacaagaatacaggaactgagaaaggaaaagagggtaacgcagatggaactggcagaatctgtagatgtgacccggcagacgatcatatccctggaaaacggcagatataaggcttcactggtattggctcacaagattgcccagttctttggagtaacgatcgaggacatttttatatttgatcaggaggaggagaatttatgataggattattttgcgcaagcaatgcgaaaaacgatgaagagtataggaaagcagtgaagaaaaaacagagatacctgatttatctgttcatagcaggcgcggtgacattggcagtctcacttctggcccacagttattgggatgttcagatcaatgagcatatgctgggtgcatatgcaggggtggggacaggtctgatggcagcagccctggtactgtggatccggtttcagctggtcttaaaaaaccctgccaaattaaaggaacttcggctttccaatactgatgagagaaatcaggaaataggcaagaaggcataccggtttgcggccactgcattgattatagctctctatgggacctggctcatcggcggtctctggtatccggtacttacaaagatcgtgggtgttctcgtgtgggtattcttgatcacttatgtagtctcctacaaagtgtttgagcgcagaatgtaaacaaataaaaagtacgcctgatataagctgggcgtacttttcagttacataggttttagatttttgttaagccggccgaccatccataagatccgcttttcccggccggcatcggtctttgcatcaaaataagccttagtgtaagtttttttaacagacggtgacattgcctgaaagtttgtatatgcaggttcatactcttttaacagagcggataaagaagcgatctgttcttctgtgacggccggagatttcggggcatcccattggccgttttttttggctttctctatttttgttctgccatcatcggtcataagcccttgttcctcaaggcttttcaccaactttttatttttttcagaccacttactgttttctctgcgcgaagaaaaatattttttgtaggttttgtcatcgatcttctgcatctttccatcaatccatccaaagcacagggcctcctcaagcgcttcacctgcttttatggtttttggaccgcctgctttgccgaataaaagccaaataccggcacttgaccggccattgtcagacagccatttccgaaagtccgcccgactggcgaattgtttaggttcactcaaaataaagccctccttttttgatcttaaagttttcgataccggttaaatgccgcaaacacttcctgctttctcggttcagctagattggacttcacatatccacagtcaaggattgccgctaggccttttgtctctatgatccgcatcagttcttccacaatctgccgaagatccttccggccgtcgatcagatgaagctgggcatacagaagtgcatacgcgagcgccgtagtctgttcagcatcacagagctgttccgtatatcttaagtctacagtctctttattaatttggaacgcatcctttcccagtgttttcaacttgtttcttccgtttttcgtaaaggaacggttactctggatgatacggcaaaatgatggattctccggcattttttctgggagcgtcaccaaaggaaaggctttggcctcttcttttgcaaaggcagtgatttctttcggcacgtatcggtccatctgcaggatatgatcggcaacctggaaataggcaccggaacttccggcaacaatgatggaagagatcccgtggtcctcatacaatccttgaacccgctcaatgaacggcgtgatcggttcaagatcccggtggaccactctctgcatcagttcgtcccgaatcataaagttggtggcgctggtatcctcatcgatgaggaacagggaagttccggcttccatgctttccaccacattggcggcctgggaagtacttccgctggcatcctctgtggagaaggaagaggtatccttgccgtttggaaggttgttgataaacagagaaatatctgtgtttttaatactgcgcccgtcctcggcccggagtttcacggctgtgtcatcggtgatcacatattcccttccgtcattttttatatgattgtacacgcccagttccagagcttttaaaagagtagatttcccgtggtatccgcctcctacgatgagagtgatgccttttgggactcccattccggtaaggggaccgtgatggggcaggttaagagtgaccttcagggaatcaggagaatgaaaagccaccgcctgcttcatcgggcgggaagaaacaccgctttccctgggtaggatggaaccgtctgccacgaatgcgcagaggcccagttttggaagctgctcccggatatactgttggtcttcagaaagatcggccacttcttttatgacccttttatttaacctattataatagaaggaagagcgcacacattccggcaggaaatcgaacaggatcttaatcagttcaaaggcggcgatggttcgtcctctggccgggaatccaacctcaaagtgaacggagagattaccggaggaaggatccatggacaaagcggtgcgggataagatctcctgtccgcacctgctgacagagataagcccgctttttccggagcctttggctttgaagttaaaagactctagtttttttgcgaacaagcgtgtcagatgatcctgaagggcaatgcgcttatgaggcaggtcaaacagggaagacggaaatccggccgttgagccgggaatcacggcactcagtttggaaggagatgcaaaaggatctccctgtacgtggtcaatattcagcacatagccgtcaaaacgatagctgcctcttgtgtctttatatgtgggataacctttatggtcgatcctctgtaacaatgcttttaaatcatcagatgtcttcataatgaataaacctttctatcatggatattaacacttcttagagtaagtatcccacgattaaaaagagccgtcaatgcggaccacgattttttgttttatggacgcagggcacactgtattctatgccttccgggcttggcgtgcttagcacgttaaggtataatgtttttaatagtatttacttatggatctggttcaaaggagggtttagttatggaatgtaagagagtttgggcagtctatttcagtgccacagatacaacaaaaaagattgtcacagttttggcaaaggaggcggccagaacactgcgtgtcccgtatcacgagtatgactttacgctgcctggtgcaagaaaagagctcctcgtttttgaacctgaggatcttgtggtttttggaacaccggtctatgcaggcagggtgcccaatgtgctgcttggattcctaagggattatatcaagggaaatcatgccctggcagtgccggtcacagtctatggaaaccggaattacgacgacgcgctgatagaactccgcgacctgctggaacaaaaccacttttacaccattgctgcgggagcctttgtgggagaacacgcattttccaggacactgggaaaagaccggccggaccacaaggatgtcagcctggccagggagtttgcgtatggactctgtcagcgtctcaaaatgtatgagaaggaggattttgtacaccctgtgtatgtgaagggaacgccggcaccgtacagagggtattatcagccccgtgacagaaagggaaccttcattgatatcagaaaagtgaagcctttgacttcaggggactgtgatggatgcggcatctgcgctgaggtctgtcctatgggatctataaaccgtgaggacgtgaaaacagtaaacggcatctgcatcaaatgcggggcttgtatcaagaaatgtccaaggcaggccagatattatgaggatgaaggatatctgtaccacaagacagagctggaagagcagtatacagagcgggcggaacctgagatatttttctagacagacagttaggaggacggaatgataaaaaatgtgatatttgacattggaaatgtcctggcggattttgcgtgggagcagttattccacagacttggatttgagggggaaacgtttgagcatatggcagatgccacggtgagagggccttactggcaggagtttgaccgcggggccatgtctgaccaggagatcgtagaagggttctattccttggcgcctaaatacaagaaacagattgatctgttttatgagcatattcatgagatgacggaggaatatccttatgcggctgagtgggtcagaagtctgagggcagagggctattctgtatacattctcagtaattacggcaaaacatcatttgagaatcgaaaagaaccattttcctttctcgctgaggcagacggaagtctgatctcctatgaggtgctgtcagtgaagccggaaagagagatctatcaggcgctggaagaaagatacagcatcacccctcaggagtctgtttttattgatgacctggaggtaaacgttgaagcggcaaggaactatgggtattcaggaatcatatttaagagcagggaccaggcagaggaggaacttaagaagctcaatctcataaaataatgattgtgcaaaaccaggtatatgctttataatttaagggcagtaagaaatacaagggaagggaggaataaaatgaaagagagttctatgatgaaaagaatcctgttttttataatcgtactgtcttttggtctattttcttccctgtatatatactcccaagccctgcacaacaatctggaaaatgaagtcttaagctcccttcaggaggtctctggacagagcgtggagattttgagaaaagaaattctgggggagatcaatctcctggacggcatcgccaatgaaatcagcgataaaaagcttgagaatccgaaaaagctggcgaaaagttttcagaaggtttccgacaagtaccagtttaagcggatggggatcattcttaccgatgggaccgtatatacaagcgaccagaaggtggggaatctggcagaccgagagtatttcaagtcagggctggaaggcatttcttccatttccgagacattgacagaccgcctggattcaacaaaagaaaagatcaatatttacagcacgcccatcgtccggggaaagaaggtggaggcagtattatatgcagcctaccggacggatgattttaaaaaggctttgtctatctctacatattatggaaaaggctatacttatgttgtgaaacgcaacggaaacgttgtggtggactctgacaatcacaatagttttaaagatatgtccaatatctttaaggctttgcgcaaggcatcggcagaaaataaaaattgttctgaccagctgaaaaaagcattaaaaaatcaagaaaaaggccacattgagtttctcaatggggagagaaagtacatgtactatgttcctacggagatcaatgactggtatcttctgactgtggtccccaccgaagtggcaaatacaaaagccatggccattatgaaactaacctatgtacagtcaggcattattctagctttatttctggctcttttgatttacattgtaaggtccgagaaaaagaagcaggtcaagctgatggagattgcatatacggacagtatgacaggcggagataattaccgggcattctgtttaaaggcagagaaggcattggaaaaagagactggcaagatggctgtcctctgtatggatatcgaccgctttaagctggtcaatgaactgtttgggtttaagacaggggatgagattattcgtctgatctggcatatttggagaggcatgatgcaggatggggaactggcggcccacagggaggcagaccgttttgtaggacttatgcactatcattcagagaaggagcttctgagacgtctggaccagttcatcacacatattcagcggatgaagaatatgaactataaaataaagccgagtatcggtatttatctggtaactgaccgcagcatggccattgatgccatgtcggacatggcgctgattgctcaggccacagtaaaaaaccagctgcacaattactacgccttctacaatgaagaactgaaaaaacggattattcataacaaggagatggaggaccggatggaaacggctctggctcagcatgaattctgtgcctattatcagcctaaatatgatacggagacaaagaagatcgtaggggcggaggccctggtcagatggatcggaaaggacggaaagatcgtaccgccgtctgactttattccggtttttgaagaaaacggtctgatcgtcgtcctggacgaatttatgttccgggaagtctgcagacagcagcggcagtggatcgatgagggaagagaggtagtgccggtgtctgtcaacctgtcccggtataatatcttttacagcgcttttgtacaaaaatatcaaaatatcttggaagagtataagatcccgccggaactggttcctctggagatcacagagagtgttatgtcagaggatcaggaactgctcaaaaacattattgatgaactgcatgagatcggattctccgtactgatggatgattttgggacagggtattcttctatgaccatgttaagttcgatgccgattgatgttctgaagctggacaagagttttgtggacgacattggcgacaacaggggagaaaagattatcaggagcattattgaactttccagaagcctgggaattcacctgacagcagaaggggtggagacggaacagcaatatgaattcttaaagaagcttcaatgtgatgacattcagggatactattttgcaaggccaatgccaggagacgaatttgagcctttactaaagtaaaagctctgaagtacagaaaaatatacaataaatattaaaaaaaatgaaatttcctcttccatttttgaaccagacgtaatataatagaaaaagcggggcatggctcagcttggtagagcgcgtggttcgggactacgaggtcgcaggttcaaatcctgttgccccgatgaatcctccattttatgggggatttatttttttgtaagacaatgaagcttggttggctttggttgggattatccagtgtgtaacaaattcttgaatttggaattgcgctcttggataatctttttcttttcgtctaggttagaggtatcgtaggtataatacttttcatttgtctctgtggtatgtcccaacatactagcgacaattgttttaggtgttccttgcatctgcaaatcagaactggtcgttttccgaagtttagtaatgccaccaccgtttattttttgttcacagcatagccttgtcatacaatcagtaatatttcttgcaggagtataatattgatgccatccactattctgtccgtgacaatggcatgatccgtaaacttgctgcctatgtgattcttgggatcaatgccgaagggaaaaaagaggtccttacgatccaaaactgggcacaggtgtatggggagttaagaaattgtgttcttaatttccttttttttatatttttgttgtaccactcagaaaagtgatagttgataaatttattacttttctaagtggtacacttgtttacttaaaatatgaagtatgctaaagtaaaattgaaaatatatgacaggtgttacaaatgttaaaatataaattcaatgttggagatgctttagaacaggctggcataaatatgtataaagcaaaaccccaaaggatttaattgagtatgttcctaaagaggaagagaaaaaggctctttttaaaaacttctaatattcacttttagaagtggtatgattatatagtatcaagaaaggatctaatactatgccaacagcagaaaaaatcatggtttctatcatgagtggaacgtaagataaaaatataaaattcagagacttgagaaaacttcttgatgtcttaggttttgaatgtagaatcaaaggggaacattttatttactcttacaaaaatcttccggataatataaatatccagccacaagggaatatggctaagccgtatcagatcaagcaaatcagaaattatattttgaaatataaaatcaaattataggaggtatccaaaatgtataaatatgaacgtattatttactggtcaacagaagatgaagcatttattgttgaagtacctgaactgcctggatgcatggcagatggcaaaacggtacaggaagctatcagcaatgcagaaataattatagaagaatggattgaagtagcaaaagaaagaggacaacaaattcctgaaccaaaaggtaaattaatgtacgcataaaaggaaaagagcagaactcgctggtttttgcttcatttatatgtggaattgaatggagacaaaagagacttagtcggtagttttacagattaagtcttttttagctgatttactttgatccgtttatgctctctatgaaaaccatatcatttattgcataaggttttataaatccctttataatttgatcatgttccagatttccatgtgctaaatcgaataaccaaattttcatttcctcagtaaaattcataacgatacctccaaaaaatttaaaatattaagaattacaatcgctattcatattaaaaaaatcgtcattatttttttgtcttttaaattaagaactttcgacaatgccaaaatttcttttagtctaaactgtgaacagttattgaattgagttgaaaaagctaaaacaaaataaagaagcaacttaaaaatataatggcttattatttgagttaatatttaaatatacggatatacaagttttcctttctaatcatctaagtcgaatgttacaatttattttggttggggtataaagtcaaccctttccaaagcattaattttatatctgattatgtcatagaaaattcttgaaaataatggtgcctcttgttatctttattttcacgacgtataataatatcttgtggggcggacacctgtctgccgttttaacaagagtagaatagggagaaacatatttatgaaaaagaaaaaaataggtttgctgacacggctgctgatcggtatcgttgcaggtatgctggtcggttccataggagatctgttcggtgttggcgatacgtttgtttttaaaggtctgatccgcctgtttgtgacctttacgacactgtttagtacatttttaaattttatcattccgcttttgattctgtcctttgtggccgttgggcttgcggacttggggaaaaaggcaaataagctgtttggagtgaccctgcttttagcctatgcatccactgtcatcgcggggatcggcgcattttttgcgggaaaggctcttctgccgtcattgattcagagaattacaggaagtgagatccaaaccaagtcttttgaagcgatctttaccattcaggctgacccggtcttcggagttatgacagcgctggtcctggctttccttttaggccttggcatcgccaacagcaggaacgatacgctgctgctctgcttaaaggatcttcaggagattattacaaagacactgaataagatcatcataccgatgatcccattttatgtggccgggctgttcagcaagatcgccgcggaggggaagctgcttcccaccattaaaatgttcatcaagctgtatgtgatgatcctgattttccaatggctctacatcgcgtttcagttccttgtatccacattgttcacaaaagaaaataaatttaagaatctaaagggcattgcccctgcctacttcacggctcttggaacccagtcttccgcatctactataccggtgaatctggagagcagcaaaaatggcggggtatctgaagatattgcggactttgttatccctctttgtgcaacgatccatctgtctggggataccatctgtctggtgatcggttctatgggtattatgcttgccaacgggctgacacctaccctgtctatgttccttccgtttattttcatgctgggaatcacgatggtggcggctccgggagtaccgggaggaggcgttatggcagccctcgggctgattaagtccatgctgcattttacggaccctatgagccagctgatcatttccctgcacttttcccaggacagcttcggtacagcctgtaacatcacaggagatcaggccattgcctacatggtagacagtgtggacaggaaaaacggagaaaagtaataggaatggaaaaaagagaggttttatttactaataaggatttgaaaagcttaatcatcccgctgatcattgagcagatgctgactgtgactgtggggctggccgactccatcatgatctcaagcgtgggggaagccgcagtttccggtgtttcgctggtggacagcatcatggtcctgttaatcaacatgtttgctgccctggctaccggcggcgcagtggtggccgggcagtatctgggacagaaaaagcatgtgatggcctgcaagaccgcagatcagctgatcctgtttatttcagccctggcgctggccatcatggcggggatctatgccatgcggggactgatccttcacggagtgttcggggccattgagccggcggtcatgcacaatgcggaggtctatctgctgatcgtgaccgcatctattccatttttggcagtctacaacggatgcgcggcgctgttccggaccatgggcaattccaagatcgcaatgcagatgtccttgtttatgaatgccatcaacatcatcggaaacgctgttttgatctacggcgtcggtatgggagtggaaggggcggcgatcccgacactggcttccagggtgattgcggcagtggttattttggttttattaaaaaacagaaaccaagccgtacatatcagcagaaattttcattttaaatttaagggatttctggtggggaaaattttaaatatcggagttcccaacggggtggagaacagtatgttccagctgggaaagattcttgtgctgagcctggtggcgggctttggaacttctgccatcaccgcaaacgcagtcagcaacatggtggctctgtttgagatcattccgggtatggccgtggggcttgcggtgctcactgtggtatcacggtgtgtaggcgcaaacgattatgaggcagcccgttattatacaaaaaagctgttaaagatcgcctatgcttcgctgcttatatttaatatttttatcgttttcatacttccagtcatcataagagcttatcaccttacaccggagactgcggccattaccaggaggattctgttgtatcatactctatgctgtgtgactatctggccggtttccttcaccctgccaaatacactgagagcttccaacgatgcgagatatacaatggtcgttgccattatctccatgtggatctttcgcatctttttcagttttgttctgggaaaatggcttggatggggagtgttcggggtatgggttgccatgaccttagactgggcagtgcgtgctgtgctgttcatgatccgttacttcagaggcaaatggcagtacaaatccatctgagttttccttgacaagagggaggatatcgtgtaatttaatagatataaactatcggtttgatagatataagttatgaatgtaggagaacatcatgtcagcaaaaagagaaatgtcaaatgcatatgctttttcattttatttctggggttattactttaatcctggctttttgcgctacaatgaatcatctcctagaaccaagtaaagtttaatcgtaatagattatgtttaggacctgtattcttgtagtagaatacaggcccttttttatttcattggaaagtacctcctatgaaataaaaagtccaacggacattatgcacacaaatcaaggaggagaaggtatcatgattattattttaaagagtgacgcaaaggatcagcaggtagaggcattaaagcaggagatggagtcccaggggtttgccatccacgaatctgccggcattaatacaaagcttttagggctgatcggggatacttccaaagtggatgtggaccatgtgatggccaatgacattgtggagaccgtgcagcggattcaggagccatacaaaaaagccaacagaaaattccaccccaatgacacggctgtggatatttctggggtcaagatcggcggaggaaactttcaggtgatcgcaggtccttgctccatcgagacaaaggagcagatgacagaggtggcccagcaggtaaaagagtcaggggcagggttcctgcgaggaggcgcatttaagccgaggacatcgccttacgcttttcaaggacttcacgatgaggggctgaagcttttgctggaggcaaaaaaggccaccggacttcctgtcgtcacagagatcatggatgccagccatctccatctgtttgaggacgtggatctgatccaggtagggaccaggaacatgcagaattttgaactgttaaaagaactaggaaagatcgacaaacctgtgcttttaaagaggggaatggcctgcaccattgatgaatggctcatgagcgccgagtacatcatggcagggggaaatgagaacgtgattctttgtgagcgtgggatcaggacctatgagactgcagtgaggaatacactggatctgtccgccatcccaatgatcaaaaagaaatcacatctgccagtgatcgtggatccatcccatgccacaggaatccggtttatggtagagccaatggctctggctgccattgcggcaggggctgacgggctcatggtggaagttcacaacaatccggccaaggcgctctgtgacggtccccagtctctgaccccgaaaggatttgaccagatgatgaagaaggtaactaaaacaagagacttctttcaaaatttataatcttttgttatactggttccagactaattggaaaaggaaccaggacaaaggagcagtaaaatgaaagtgatcgcaggactgggcaatcccggcaggcagtatgagaacacaaggcataacatcggatttgcggctgttgactatattgccgggaaaaaccagatagaattttctacaaaaaagcataaggcgctcattggaagcggatacttaggagggcagaaggtcctgctcataaagccgcagacctttatgaatttaagcggggaaagcctccggggaatcatggatttctataagctggacccttcggattttatcgtggtctttgatgatatatctctggatgttgggcaggttaggatcaggagaaaaggaagtgctggaggacacaacgggatcaagagcatcatcagccatctgggcagcatggattttccgaggattaagatcggcgtgggagaaaaaccaaagggatatgatctggcagattatgtgcttgggcatttctctaaaggagagagggaaatctacgatgatgtgttcccggatgtggacgatgcggtaaagcttatggtaatggatgacatatccggagccatgaaccaatataataaaaaggcgaggaagtaaccgcagcagaaagtaaggaatgagacgtgttagagcagatttttgaaaacgatgcagtatatggacagataaaagcaggccttgagcgtcatcagggtcctgttttggtgtccggatgtactgacggggcaaaagcccacttggtcagtacatttaaaggaaagaagaaacgcggaaattataagatcattgtgacggcagatgagaataaggccaaggaatgggcagagaattaccagttctttgggggagatgccatctattttcctgccaaggatccgctgttttacagcgcggatgtccatggaaatgccatcgcaaaagagcggcttagggggattgagagcatcataaaaggacagggtggtgtatttattctatccattgatgcattaatggaccgggtcgtgcccctttctgagatcaagaagaaccgggtgaccatcagcctggagacagaaatttctgagcaagagatcacaaaagaatttacggccatgggatatgagagagccccgtttgtggaggctgccggtgaatttgccgtgaggggcgggatcatagacatctacccgtttacctcggactgcccgtaccggatcgagctttggggagaggaagtggattctatccgaagctttgacgcccagagccagcggtccattgaggagatcaaaagcctgacggtttatccggccacggaaatcgtgttaagtgaggagcggatcactgcagggcttaaaaagatccaggcagaatatgaggacctggcggcgaagttccacagtgcgtttgaaacggacaaagaggtcaggctgaaaaaggaatacaaaaggctcaaggaagaactctccgagctttccatgctcatcggtgtagaggggtatcttccgtatttttatgacaagcttgtatcctttttggattattttccgaaagaaaccacagtctacgtggatgagccccagcatgtggaagaacggggaaaaggcttttatctggaatttactgagagtatgaaaagccgtctggaggcaggatatcttctgccaagccagatggaaacggtatcctgttttgaggaggcgttgagccgtctgatgaagcagcagacggtctttttatccgcgctggcttccgaggtgaagtatgcaccgggcacagagaccttttttatggaagcgaagtctgttcagtcctacaacaacagctttgagcagctggtcaaggacctgaaaaggtatcagaaaaaggactacaggatcctggtggtgtcaccgtccgtcacaagagctaagcgtctggcggaggatatgagggagaatggtcttacggtcacttatgataaaaagccctcagaagagatggctccgggacagatcgtcatcacccctgggaaattaaaaagcggcattgaatatcctgagacaaagtgggtgttgatctccgagagtgatatattcagcggaagaaaagaaaaacgcaggaaaaaggcggcgtttaaaggcaagggcgagaaaataaagaactttgctgatatttctatcggcgattatgttgtgcatgaaaaacatggtgtcggcatttaccgggggatcgaaaagatcaccgtgaacaatgtggaaaaggattatatcagcatcgagtacaagggcggcgacaatctgtttattctggcttctgctttggaccagattgccaagtacgccagcgctaatgcaaagaagccccggcttaataagctgggaggaaatgagtggaagaagaccacaaagcgggtcaaaggccaggtcagggagacagcaaaggaactggtggaactgtatgcggtccgccaggccaaggaaggatacgtgtgtgataaggataccgtttggcagaaggaatttgaggagatgtttccctatgaggagacgcaggaccagctgaatgccattgaggatgtgaagagggacatggagagcacaaagatcatggaccggcttatctgcggcgatgtgggatacgggaaaacggaggttgccatccgggcagcgtttaaggcagtgaccaacggaaagcaggtggcctatctggtgcccaccaccatcctggctcagcagcactacaatacattctgtgagcgatttaaaaattatcctatgacggttcgagtcatgtccagattctgcagtccaaaggaacagaaagagaccatggagggcctgaaaaaaggaatcgtggatgtggtcatcgggacacaccgcctgctgtccaaggatatgaaatataaggacctgggacttttgatcattgacgaggaacagcggttcggcgtgggacacaaagagaagatcaaaaccctgaagaaggacgtggacgtgctgtccctgtctgcgaccccgatccccaggactctgcatatgagcctgattggaatcagggatatgagcatcctggaagaacctccccatgatcggcgggccatccagacttacgtgatggaatataatgaagaattggtcaaggaagcggtccaccgtgagatgacaagaggcgggcaggtatattatgtatataacagggttaataacattgccgagatcaccagtgggctccaaaagctgcttccggatgccaaagtggcttttgcccacgggcagatgagggagagggagctggaaaatatcatgatgcagttcatggaaaaagagattgacgttcttgtctccaccaccatcatcgagacagggctggacattcccaatgtaaacacgatgatcatccatgatgccaaccagcttggactttcccagctctatcagctcagagggcgtgtgggacggtccaaccggaacgcatttgcatttttaatgtacaaaagggacaccttattaaaagagacggcagaaaaaagacttcaggccatcagggaatttacagacctgggatctggatacaagattgccatgcgggatctggagattcgtggcgcaggcaacctgcttggggaagagcagtctgggcatatggaggccgtgggttatgatttgtactgcaagatgttaaatgacgcggtactgcggcttaagggagaactttcagaggattctgattttgatacaacgctggatctgaacatcgatgcgttcctgccatctgcctatatccgcaatgaggtggagaagctggagctctataagaggatctctgccatcgacacgagagatgagatggaggatatgcaggatgagcttttggaccgtttcggcgatctgccggcggcagtggtcaatctgctccacattgcactcttaaaatctatggcacatcacgcctatatgactgatgtgaagcagaagggcgagaaagtatcctttgagatgaatcccaaggcaaatgttcaggtggagaaaatcccggatgtcttaaacgaatttccgaaggaactttccgtcagtgcaggagaacaccctgtgtttgtcctggacttgtcatcctccaaaaagagtgagtggctttcaaaaattgaacattgtgtgaactctttggatgcgttgattatcagatagttatgtagtataatgcaaaatggaaataaattaaatggaggaaacgaagaatgaaacgtgtagcgaaaaagatagcatgtctcacggcagtcatggctttgtgtgttgccttattggcaggctgcaaaaagcaggatgacaggaaactgtttgaatatgcaggaaataaggtgacctataaggaagcccacgtatatgcaagaattatgcagtacagcgcagaacagcagtacgctgcatatttaggcgataaactgtggtcaactcaggtcgggaccgacaaaaagggcaagaagatcacaatgcaggattctatcaaagacaatgtcatcaaccagattaagaccgtaaaggtgctggcagcccatgcagatgactacaatgtaaagctcacatctgatgagaagaagcagttggacgaatccgtgaagtcatttaccaaaaatgaactcgggaaacgtgtgatgaaggtgacaaacgcagataaggattacattaaaggaatccagcaggaaaatctcatcgcgcagaaagtaatgaacgccatcatcgaaaaggcggatgtgaaggtgacggatgaggaagcgaaaactgtaaaagtatacaagctcgccttcaccacaaagaagactgatagcaagaccggcaaagaagtggacatgacggcaaaggaaaaagctgcacagaagaagaaagccaaagaagcgttaaaggctatcaaaaagggccagagcgtcaagtctgtagccaagaagtataaagtggattcagacaatgaagaaagctacacaaaaggaaaagctaccctcggaacaaagtttgaagaagccgcctccaagttaaagaagaaccaggtcagcggtgtgatcgagactgatgacgcatatgtcatcatcaagatgctgaatccgaatgttaagagtgcccttgccacatccaagagtacactgctgcaggaaaaacagcaggctgcataccagaaggtatacaaaaagtggaccaaagatgcagacaagaagtgggacgatgataagagcatcaatcagaaactgtggaagaagatcacatttaagtacaaagcaacaaccacagcaacggaaaagacaacaacagaagcgacaaccactgcaaagcagaaaaaaactacagagaagaataaataaaacatctctgtccaaaggcagccctgacccggctgcctttctcttgttccataggaaagttctttgaacctccctatggaacaaaaaagccctgcgggcactatgcacacaaatgcgtgaggggttgggaggagaagtggcttgccactttgtttaaaagtaagaaagagaggagaatgcgtatggaatttaaagtcggcgacgtgatcaagatgaaaaagtcccatccgtgcgggaccaacgaatgggagatcttaagagtgggtatggactttcgtctgaagtgctccgggtgcggacggcaggtgatggtttccaggaagctggtggagaagaatttccgcggatttgtgaaaaaagcttgcgattagcaggaatttatggtaatatatcaacttgtgatatataaatttatccttgctcttggcagaagaccaagagccgaaaagaccagaaggaggtgcagataacatgagtaaatatgaactcgcattagtcgtgaatgctaagatcgaagacgaagcaagagcagaagtagtagaaaaggcaaaagctatgattacagacgcaggagctgagatcaaaaacgtcgatgaatggggaaagaagcgtttagcttacgagatccagaagatgaaagaaggatactactacttcatccagttcgacgcagagacagaagttccggctgttttagaagaaaaacttcgaattacagaaaatgtattacgttatttagtcgtaaaacaggatgcctaacattttgataggcaggaggaatccaatatgaataaagtgattttgatgggccgtcttaccagggacccggatgtgagatactcacagggtgaaagagcgacggcagttgcaagatatactttagctgttaacaggagatttaaaagggatggcgaaccggatgcagactttatcaactgcgtcgcatttggacgtgccggcgaattcgccgagaagtatttccgtcagggaatcaagatcgtcatttccggaaggatccagacaggcagttacaccaacaaagacggaatgaaggtctatacaaccgacgtgatcgtggaggaacaggatttctgcgagagcaaagcggctacagaccagtataacgggggaggcatgcagacagccaatccttcaaaaccgccgcagccaagccaggccgcaggagatggttttatgaacattccggacggattggaagaggaactgccatttagttaaataggaggtttaatcatggcttacaatagaggtgattctccgaacaggagaagaggcggacgcagaagaagaaaagtatgtgcattctgtacagaagccgatgccgttatcgattataaagatgtagcgacattaaagaagtatgtttctgagagaggtaagatcttaccgagacgtatcacaggaacatgtgcaaagcatcagagagctgtcacaagtgctatcaaaagagcaagacatctcgctttaatgccttatacacaggattaataaaagacaagccgccgtatccttatgggtatggcggcttttttgacctgacctgccagtcatgctataatgaaaaatacaatatttgaatccgaggtttaaggagctgtaccatgaaaaataaaaatacaagtgtaaatatcagtaaagatatcatttggccggttctggcaggactgttgtttctgatcgcggacattctggtattttctattgatgtgaagtcaggtgtgatcctggcctgctttgtgttcgtttttctgctgttttctttgttttattatccctaccataaaaagaaaatgatgcaggaaactatggactttatgtttgagcagagccgtgtccagaatcatctgatcaaggaactgcccctgccctatgtactcatcggcggggacggagatatcatgtggtataatcaggcgtttgagaagatcctggatgggaagagcatatccaagctgcagcagatgtttccggaactggacaaaaatcttctgccgtcggagatgaaccactcagtttcccatgtaaaaaaagagacactggagaaggaccaggaaaggacctgcttttataagatcgagttcgtcaggatccagatggacagcctcattgatgaggagacggagagcaagtcaaagcagtggctcagggatcagtctatggtggctgcttacttttttgaccagaccatgctcaagatgtatatggagcagaacgaaaaccagcggatggtggtggggctgatctatattgacaactatgaggagctgcttgacaatgtggacgaggtaaagcagtccatgcttctggcgttagccgatcaaaagatcaacaagtttatccagaatatttccggtatcgttaagaagacggagaaggataagtatctgatcatctttcagcagaagtatctggagaaggtaaagaaggaaaagttccatatcttagaggaagtaaaaagcatcaacctgggcagcagcggcaatatgacgctgagtatcagtcttgggatcaacggacagagttatcaggagaattacgaggcagcgtgtacggctatggatctagccctgggccgcggcggtgaccaggcggtgatcaaagacggtgaagatatttcttactttggggaaaatgcagccgtggtggagaaaaacacccgggtcaaggccagagtcaaggcgcatgcgctgagagagcttctggaatccaaggataacgtggtcatcatgagccacaagataccggatccggatgccatgggcgctgcggtgggtctgtaccggctgggtctatctctgggaagaaaagcccatatcgttatgaatgaggcgacgatctccgtgcgccctatcgtggaggaacttctggcgtgtgaggaatacgatgaggatatgttcattaccagcgatacggctaaggagattacagacgacaatacactgctgatcgtggtggatgtgaatcacgcaagctatacagagtgtgaggagcttctcgatcagaccaacaccatagtcatactggatcatcacaggaagggcaaggaaaccatcaaatatccagtactctcttatattgagccatatgcgtcatctacctgtgagctggtagcggaggttctgcagtatattgctacaaaacccaagctcttaccagtggaggccaatgccatgtattttggcatgctcatagacacggataactttgtcaacaagacaggtgtccggacatttgaggccgcggcctttttaaagcgcagcggagccgacttaaataaggtcaggaagatgtccaggaccagtctggatacctacaagatccgggccaaagcagtcagtgacgctgagattatgtacggttcttttgccattgccactttggtaggtatcggaatcgacagtcctacagtagtgggagcccaggtggccaacgagctgttggatattgacgggatcaaggcatcctttgtgctcactggcgtggaggagcgtgtctatgtcagcgccaggtccatcgacgaagtaaatgtccagaagatcatggaacagtttggaggcgggggacatctgacggtagccggagcccagatggtggatgtatccctttatgacgcaaaacaaatcatcaaaggaactctgcagtttatgaaagaggaaggagacatataagatgaaggttattttattacaggatgtaaaaaatgtagggaaaaaagacgatattattgacgcaaacgacggatacgcaagaaatgtgctcctgcgcaaggggcttggtgtggaggcaagcaagaaagcagtcaacgatctgaagcttaagaaggctaatgaagataaattagcaaaagaaagattagaagaggcaaagaagtttgctgaggagctcaaagaaaaagaagtcatcttgacaatgaaagtgggagaaggcggaagaacatttggtgccgtatctacaaaagagatcgccgaagctgctaagaaacagcttggatatgacttggacaaaaagaagatgcacacagagccgatcaagacgcttggcgtacacaatgtggaggtcagagtgcacccgaaagtgactgccacgttaaaggtgaaagtgaaagaggataaataaagacaatggatgaggcatttatcaagaagatacaaccgaacagcatggaggccgaacagtctgtcatcggagcgatgatcatggaccgggatgccatcgctgacgtttctgatattgtcaccaaggaggatttctatcagaagcagaatgggatcctctttgagtccatgtcagagctttataaggaggggaaaccggttgacttggtcacccttcagaataagctgaaagaaaaagatgtgccggagtccatgaaaagcctggaatttataagggatctcttagaggctgtacctacgtctgccaatgccaagcagtatgcccagatcgtcaaggagaagtctaccttaagaaagctgatcagagtcaccgaggagattacaaaggactgttatcttggaaaagaggaagttccgctgatcctggagaagacggagaaggatgtattcgggcttctgcaggaggccagcggccgtgaagattttgtctccattgaccaggtagtactcaacacgctggagagtatagaggaagcggcagcgtccgacggaaggatcacaggggttgccacggggtttgatgaccttgattttaagcttacgggtcttcatccgtcagagttaatcatggtggctgcaagaccggccatgggtaagaccgcatttgtcttaaacatcgcacagcatgcggcggtgaggaagaatgttcctacagctattttcagtttggaaatgtccaaggagcagctggtgacccgtatgatctccatggaggccatggtggattcccaggcgatccgtaccggagagctccaggagaccgagtgggagaagattatggagagtgccggtaccatcgggcgttctccgctgatcatagatgatactccgggtatcacggtggcggaactaagatccaagtgccggcgctataaacagacatacggtctgggcctgatcatcattgactacctgcagctcatgtcaggcggtaaaaagtcagagtccagacagcaggagatctccgagatctcccgttccctgaaagcgctggccagggagatggatgccccggttatcgctctttcacagctgagccgtatggtagagcagaggaagccgccgaaaccggtcctgtctgaccttagagagtccggttccatcgagcaggatgccgatgtggtcatgtttatttacagggatgattattacaatgaggactcggagaaaaagggtcttgcggagatcatcgtggctaagcagagaaacggttccaccggaagtgtggagcttgtctggttaggccagtacaccaagttcgggaataaagaaaaaatcaggatgtagcctgcagaatatgtgagaaaccgtcgtcttttagagggcggtttttcttgtccgcaaaagtactcccaccttataataagtaagaagaaaggaagggacttatgaaggaaaaaagacgaatgatttctgaagcggccaaagaattagggttagaaacctatactctgagggcctgggaggaagagctgaaacttaatattccgcggaatgacaaaggctaccgttactatggggaaaaagaattacatacatttatgaagatccgtgatatgagggatgagggtatgagcatggatgaaatcaaagaagctctgccgaagaatgtcattccttttcccgcaggcgggagcagtgtgggtccgcaggataaaatggagcagttccaaagtgttatggttaagattatgggacgagctttaaatgagcagaaaaaccagctgagcagggacattggggatcaggtctccaggcaggtggcaaaagagatggattaccagttccgtcagaaggaggagtcagaagaaaagcggttccaaaaaattgatgagttgatccgtctgcagcagcaaagccgggaagagatcgcagctacaaaagaaagaggcttctttttcaaaaagaaaaaaagaaaccgcgaataaaaatattaaatgactttttaaaacaaaaaagagatgccttttggcatctctttttatgtaccgattattcctggctgatagcgccagttggacatccgtctgcgcaagctccgcagtctaagcatgtatctgcgtcgattacgtactgtccgtccccttcgctgatagctcctgccgggcaagttccttcgcaagctccgcaagagatacaagcgtctgaaattacatatgccatatctatgttcctcctttagaaagttgtgtatgaaatggcgggtgacccgccttccaggtacttttcattttaatatacttaatatacaatatcaagggaattcccatgaattattgtatttttaactgtaatgtattatactaaatgagattcttccccgtaggttttatagggaagaggatcgattgttaagaatggaggtaacgtcaatgaatacaatcacaaaggacatggtaatcggtgatctgctggcccttgaccagaatttcgcggccatcttaatggcatccggcatgcactgtgtaggctgcccgtcttcccagggcgagacactggaagaagcggctttcgttcatggcatgaatgtggatgaactgcttggaagactaaatgaatatatggagacaaaacaggcttaatgctctgtcgccataaggcttagaggacaaccctcggaatgatgattctggggattgtcctctttttttgttccataggaaagttctttgaacctccctatggaacaaaaaagcgttacgagacgttgcgcaaaggtattgcgcatgcttgtgatgagcaatccaatgagcaactttgggacccaattcagattgttttagtgggtattacagggttacaatttaagagtaataagaacgaaatgaaaataaaaagaaaaggagtgataatgtttgaaacgcgacatgatttacaaagagctgattcagctggatatggaagcggccgacaccgatgacttttttaataagatggctgcgaaactagaagagctcggttttgtaaaggattcgtttgtggatgcaatcaagacaagagagaaaaacttcccgacggcacttgctgtagagccgtatccggtagcgatccctcatgcagacccggaacatatcctgaagccttttattgcgccagtcaggttaaaggaaccgattaaatggtgcgagatggcagcaaacgatgtggaacacgatgtgaggtttgtctttatgctgggcttcaagcggtccgatgaacatgtggaactgcttcaagtgctggtggccaatttccaggatgaagatctgatgaaacgtcttatggaagccaagacaaaagaagagtacatggaagcgatcctttctatggaaggattataagtatcaaatgaaagtaaatacaattaggggattatctcaagaaaggaaataaaaattatgaaaaagattattgtggcatgtggaagcggagtagcaacatctcagacagtggcgagcaaggtaaaccgtttattaaaggagaataaggtagacgcacaggtggaagccgtagacttaaagtctgtggaccgttatatggattccagtgcagcatatatcgctatcactaagattgacaaggaatacccgatcccggttatcaacggtatcgcattcttaaccggtgtgggacaggatgccgagcttcagaagctgatcgacgcctgcaagtaagagaatggagaactacaaaagacacattgtaagaggatgaaaggagagattgtatgcaagcattaagttcagttgtcaattatctattaagtttgggggcggcgatttttgtgccgatcattatcattatcgccggactgatcgtaaggatgaaggtgaaggatgcggtttccgccggtatcacactcggggtggcgtttacaggaatgacaatgctcatttccttcatgacggataccatcagcccagcggctcaggccatgttaaaatcaaccggtatttcactgcctatcgtggatggaggctggaccaccatgtcaaccatatcctggtcctggccgtatgcgtttttaatgttcccgctgttgatcatcatcaatgtcatcatgctggtcattaacaaaacaaatacattcaacgccgatctttggaatgtatggggtaagatttttactgccgttgccgttgtagccatcacaaaacctcattttggaggggcaggatccattgcctgcgcatttgtggtagcagctatccagatcatttttgagctgaaagcggcagatatgcatcagcacagaatcgagaagctttccggaattccgggtgtaacctgtacccataagatgaccttcctggcagctgtcatgtatccgatcgactgtattttaaagaaagtacctgcattaaacaaacagtttgacgcagcggcattaaaagataaagttggtatttttgcagagaaccatatccttggattcattcttggtattattttcggagttctcgctagatacagtgtagcagatactctgaccctggcgattaaggcagcgacagcgctgactctgttcccggttatcacaaaatactttatgcaggcattggctccgatatctgaggcagtcagtgacttcatgaataagaagttctcaggaagaacgcttgtggtagggcttgactggccgttcctcggaggatccaatgagatatggctggcagtgatctactctgtgccgatcacattattattctctatgttcctgccgggaaatgaaatccttccgtttgcaggtatcatcaaccttgcacttgccgtaccagcattccttgttaccggaggaaacctgatccgtatgattattctctgcaccgtcttcgcgccggtattcttatgggttggtactgcgttcgcgccgtttatgactgaccttgcaaggacaacaggagcagtatctctgaaagcgggagagatgatctccaacagttccattgatggaccgatccagacttacgctttctcccatgtatttaaggtactggacggaaactttattccgctggccatcctggtcgtctgggtgatctgttttgtactctactacagaagccttagcaaagaagcacagcaggaaacaaacaactaaacgttttagacatagaaaaggggaagaattatgcagaggtttgtcaatgatccggattacgtcgtagaagatatgctcaaagggtttttaaaagcccacggagatcttgtcgcgaagtctgaggccaatgaccgtgtggtaaaatacataaatacaccggtggaaggaaaggtcggactggtaacaggcggcggcagcggacatgaacctgcttttcttggctatgtcggaaagaatatggtggatgctgtggcagtcggcgaagttttctcttcgccgtccgcccaggcattctatgacgcatttatggaggcggacgctggagaaggcgtggcctgtctgttcggaaactatgccggagacaacatgaatgtaaagatggctgtccgaaaagctaaaaaagccggcgtcactgtaaaatatgtaaccgcaaacgatgatgtggcctcatctccgaaagaaacgaaagaaaaacgccacggtatcgcaggcggcgtttttatgtggaagatcgggggagccagagccgcgatgggaggcagcctggatgaggtgatcgcttctgctcagaaagctgtggacaacacaagaagcatctgtgtgggattaagtccatgtgctataccggctgtagggcatccgaatttccagattgaagaaggaaccatggaagtgggtatcggacatcacggggagccgggcatcaacgttcaggaactagagcctgccaagaaggtcgccaggaatatggcggagaccgtagtggaggatctggagataaaagacggagaagaggcggcagtgctgctttctggtctcggcgcaactccggtgatggaattatatgtactgtatgatgagattgaagcgtacttgagagaaagagggatttccgtttataaagttttgatcggagactatgtgacttcacttgatatgaacggagctgctctgaccattatgcggctggatgacgaattaaaagaactgctggaccatgaggcaaagtcaccgggcattgaggtcagcaagtagcagcagatacgatgaaagagggattctagtgtatttagacgaaagaggctatttagtattaaaaacaattgtaaataatccgtctataactggaaaggaagtagagcagtctttagatttgtccaggaagcaggtcagctatacgatggataagatcaatcaatacctggcggataacgggctgcccaaaattgaaagactgcgcactggtaaattcgtgataccgattcctgtgctggaacagtaccggaccgaggatatcggtatgaaagacagtacctatgtgtattcagacaaggaacggggagcactgatctttttgatccttctgtgtgccagggaagaactgtcaatttatcattttacatcaaagctggacatcagcaagaatacatttctgatcgacgttaaaaaactggaagaaagactggcagcctacgggcttggtatccattacagcagacaggatgggtatcatctggcgggaagtgaattctgcaaaagagaggctatgattccgatcatacgtcaaattttaaacatgcccaacgggcaggaagcgatcatggagatctcccaggtggacccggagctcatgaaacaggtacggggacagatcagtgtgatcgaaaataaactgaagatccgctttacagacgagaggcttcgggagcttccctacatcctctgtctggtgctgatccgcatcagaaaagggaggatactggaagatctgccggaatcctttcagcatatcgcaggaaccaaagaatactctgttatggtggagtttgccaaggagcatgacgtggtatggcagacggagaagatcttttttgcagcgcagatccagatatccaactaccacagttttcagtcggataatctgcgtagtgaagtggagatcatggaagcggccagacaagtcatcgacaattttgaaaagatcatatgcgttaacgttaaagaacgggatatccttctggaagctttattccagcatgtgaagccggcgttttaccgggtgaagtaccactatcatatcgaacagagcattgtagatatggtactccccagatacagctcccttcatgccatggtcaagaagtctatgaagccgttggaggaacttgcgggaaacgaatttccggacgaagagctggtctatatcaccgcactttttggagcatggcttcagagagaagggattctggacatccaggatcagaaaaaacgggctgtaattgtctgcgcaaatggggtatcagtgtctaatttcttgttttttactcttcgggagctgttcccggagattgagtttttgacctgtctctccatgagggattttacagaatataaggaagagtttgagctggtctttactatggtccgcctggagactgacaagcttcagtttctggtcaaaccattcttagatgaggcttccaaacataaattccgggaaaaagtattaagtgagatcaacggcatcatgccccatgaggtggatgtgacagagattttaagggctgtggagcagcatgcggtcattgaggaccgggatgcattggtccgtgagatcaacagagtcttgaatccggccactgtccagggagtttcagagaggatgccggagatgaaggaacagcctatgctggcggatgtgctggtaaaggaaacagtccaggtgtcggagaaaccactggcctgggaggaagcggtgagaacagcgtcagctccgctgcttttacggggagatattgagcagaggtatgtagaacggatgatccagatcatccgggaggacaaaccttacatcatgatcgcagacggcgtcatcattgcccatgcaggcgtggaggacggagccggaaggatctgtatttcactgttaaagcttccgaaaaagattgatgtgaacggttacctaaaggcggatattgttattgtcctgggcacaccggatgccacaaagcatctgggggttttattccagctcaatgagatactggaggatccgtctgcgctaaaaaaactaaaacaggcaaaacagccggaagacatccttaacattgtccaaaaagaaaaggagaaatcattatgttagaatcattaaagaaagatgtagttgagattgcaaagagagcacagaaggatggattgtgcaaacatctgtcagggaacttcagtgccagagataaagaaaccggatatgtggtcatcacaccgactcaggtagacagagaacttctcaccccaagggatatggtagtcttagatttggatgccaatgtgattgaaaacctttcaggactccgtcctaccagtgagtctttgatgcacttacagatctataagacaaggccggatgtaaatgccgttgcacatactcattctatgtatgccaccacatttgcagtgctgaaaaaaccaattccggctgttgtatatgaggttgccaaccttggcgtgagcaaatccagaatcccggtagcaccttacggacgtccaggatccacagacctttctgacagtgtcattgaaccggttcaggaagcggactgcttccttctccagggacacggcgccgttgccgtagacggcagggagatctatgatgcttacctaaaagcttcctacattgaggagctggcacaattatacttcaactcccttgttgccaacggagggcaggaaccggattacttcccgccggaagaattgcagagctgggcttatccttcacagatcaaatttccaaacaaataaggagcgtgaatcatgaagaagattatcaatgagccggatcattatttaaaagagatgctggaaggcatttatattgcgcacaaggatatggtcacctgtactgacgatgatctgcaatgccttgtagcaaagcataaaaaagaaggaaaagtcggtatcgccacaggaggcggttctggacaccttcctttgttccttggatatgtaggcgagggcatgctggacggatgctgtgtgggggatgtattccagtctccaagcgcagaccagatgctggccgtgacaaaggagatcgacagcggagcgggagttctctacatatatggcaactataacggagacatctttaactttgatatggctgcagagatggcggacatggaagaggatatccgggtagagactgtgctcggtgccgatgacgtggcttctgcaggaccgtctgcgccgggtgagaaaagcacccgccgcggagtggccggtatcttctttgttttcaaatgtgcaggcgctgccgcagacaagatgatggatctggacaacgtaaagagaatcgcagacaaggcaaatgccaatgtaaggactatgggtgtcgcactgacaccgtgcgtggtgccgagagtaggaaaagcgggattctccattggagaagatgagatggagatcggcatgggaatccacggtgagacaggaatccgccgcgggaagattgaaccggcagaccagattgtggatgagatgttgaaccagatcgtagcggaccttccatacgagagtggagatgaagtggcagttttggtaaatggattgggagccaccacactggatgaacagtacattgtgacccgccgtattgacaaggtcctcgcagaaaaaggcatcagcgttcacagatattatgtgggagaatacgctacagctctggagatggcaggattctccatctcgctgctgaagctggatgacgagctgaaagaaatgctggatacggacgcaaagacaccatttttccggcaataagcaaggaggcatgtgaaaggatggacaacagttatttaatcagacttttaaaagagatcagtgatattatggctgaaaacagagagcatctgatcgaaatggacagcatcgtcggagacggcgacctggggcttactatgggtgacggatttaaggctgcctacgaaaaggttgcagacggttccattacggatgccggcaagcttttatatcaggcaggaaaggctatggcatctgccgtaccatccaccatgggcactttgatggcgtcaggactcatgcaggctgggaaagtcctgaagggtacggagacacttgagaatgcagatgtggcaaagctgtttgaagcctatgaggctggagtggcaaacaggggaaaggccaaggtgggagagaagacattcatcgacggcatccatccagcagtggagagcctgaatgctgcagcagcggaaggtgtttcgctggaagatatggcagcaggggcaaaaaaagcagccgaggaaggtttccagaatacgaccactatgctcgccgtccacggacgtgcagcaaccagaggagaggcttccagaagccttgaggaccctggagcttatgtggcagttttgatcatgaaagcttttgagaacagcaccaaataaataacatttatgtgatctactggaccggtacaaaagagtgccggtctatttttgtgtcataggaaattcctatgacacaaaaaacgctccgtggggatgcacacaaatgcgcaaggagattaattgactttattataatcccgttctgcagttgttattcgagttaataaatgttataatcaaagtataaaaaactaaatatttaaataattaaaaggggagaaacaatgatagatagagatttaacaggaagagaaactttgatcatgaaatgtatatggtcagcgggtaaggaaatatctttgcaagaggtccagaaagacttgaaagagatgtatgactgggatgcgaaaagatctacagtccgtacttttttgactagtattgaagggaaaggcttcattacaattgagagaagaggaagatattcttatataaaacctttgattaatgaagaaaaatataagagagatcaggcagagaaaatggtggatttttggtatgagggttccacagagggactgatcaaaacattaataagcgggaaattatctgaggaggacgaacggtatctaatggaggtactgggggatttagatgaatgttgaatggggttatatgacaagccaataactaataatttcgtataaaagataagataaaatactaaagatcagagcatataattattaaaagagagggggaatccatatgaatgaataaaatccatgcaatacaaggcggtcaaccttatctgcagaagcagataaccgtatggaatggatatataaatatgttatcacttaaaacgaaagaggacaatgaggaaatgtaggattattagggaaaggatttcatatgggatatacaaaattcaaaaaggctttcatttgttttgcaatgtctataatgatcgctggatgttgtgtacttcaaagccaagcggcggaagaatctgagaagacagagacaaatgatgatcttgatacacatgtagatgatggggtaccgggaaaattagatcaggatgattttgatacaaaagaagattatcagaactatttagagaaacatccagaagagcggatgaagactcgtgccactcaagcattagagaaaccaaatgtacatgcagacgctacgctacgttatacaattaatggactaaaaagtactgctgcaattcagaaaacatatattggttctacatatgtttatgtgatacaaagaagtggggataattcttaatttatcaagatgtattattaatgggagtaaagcaacgtataaggatcatatgttattgaagaattttggacatggtcaaacacttgaatggtttgaacataagaacaaaccgttcttttgggtgacttgtaaagcaaatactgcatatgataagcgctggggaacacagattggaagactggaatatcaagccggtaagactgttgattatacttccattacacgattctctcatctaagttatgccaataaaagtggaaaatcttttggttcagcaaaacgagtggacgcagcattatctagtgataaaagtaaaattcttttttgggtaaaggatacagataatgagattcagtacagttattataataccgcaaagttgaatgcggcactggataaaaaggtttctgcaacatctagatatgtaccttgcacagataatgctattaaatctgcatgttatgcttcttttcgtcaatcaggtaacaatagagtgttaccacacggatcttgtcagggattagaattttctgatgcactgtcaatttatattgcaggaggtgccgcaggtgatactccacaaattgctaagatgacaggcagtggttctaattttaaattttcatatcttgctgaaattaaacataaaaaatttaacaaaacggagacagaaattgaaggtttacagttaaaaggggataatgtttattttggaataagcgataaatcaaaaggtaatacaaatccagcctgtatatattctattccaaaaagtatttttaagaaataggcaagagaatgagtagctaaatggaatgttacattaatggtcaatttgatttaaggaggtaaagaaaatgacagaaaagaaaatattaaaattttttacatcgtttgctatatgtgcattcatgctatgtagcacagtatcttttaaaaatttaactgtaaaagcgtccactccacaggaacaggacagtgcaccgggaattttagaaattgatgactttgatacacgagcagattatgaaaaatatatgaaccgcattcatacttataaagattatcaatataagattgaaaaagacgggaaagaaaaaaatggatatagaattaatctaaaaagatatactggggctgataaatctacatccgtaccatctaagatcttacatgctcccgtaagaactatttctacaggaacctttaaaaattgtaaatctttaaataaaatcacaattccagaggacatttatatgattcaaaagggtgcatttaccggctgtaaggcaaaaattaagaaaccatcatttttgaaaaaacaaaagaacggatcatatgcagctattgctcaggttaaaataccgagaaaaggaaaagacaagaaagtaaactacaaagcatcaaaagtaactaagattacgacttctataaaaaatatgaaattaaagaaaggtaagaagaaaaaaatttatacgagaatctatgtttctaaaaaaagaaacaaggatatttagattattctattctaaaattcagtagctccaataagaaagttgtgaaggtgagtaaatacggaaatattagggcaatcaaaaagggcaaagctacaattacagtaaaactaaaaacttctggaaaatcctataagattaaagttaaagttacaaaataaagcatagaaagaaaagtgcgtctgtgtcacagtagtaagggttggctgtgacacagacgtttttatcttgcatggaagttgtttcctaagtatatacagaactatgt

SEQ ID NO: 25 - DNA, 53910 bp, Anaerostipes rhamnosivorans
ctttttaaatcttatcataggagggtttttgcttgaagcttaagctttcccccaactcacctgcatagcaggtggttttttatttcgcagacacttcgttacctgctcaatagactaaagtcaacaataaaaatggcgcaaacactgtagatatcagtgtttgcgccaaagccgaaaaccggatttgaaccggcgaccccttcattacgagtgaagtgctctacctgctgagctatttcggcaaattgggagcagttatgctccttttgttaaatattgttcaattgttgagacagcagtctcttcgtccgctccgtccgcaacaacagtaatattgtctaaatcatccaaaccaagactcatcatacccatgatactttttccattgatccttttgttgcctgcctcgattaaaatcttgctctcgaattggctggccatctggaccaaaaaagcaaccggacgttcttccttattctccgtcacatgaatattgatactcttagaaatcataatgatcctcccattctcatatcttcagcaatcttactcagcttcttaagacgatgattcactcctgatttgccaacggggggattcagcatctctcctagctctttcagagtagcctcaggatgttccaatcgcagataggcgatgtcttgcagtccctggttcagttcactaagccctctatgctcttgtaaaaatcgaatatcctcggcttgcttcacggctgctgaaactgtcttgttgatgttggcagtctcgcagtttacacggcggttcaccgtgttcctcatatctttcaagatacggacattttcgaggttcatcaaagcgacatgtgcttccatgatgtttagtacatcaacgatctttgcaccttctttgatatacactacatagtacttcttacgaattactattttagcatctaattcaaaaaaatcaagcacatcttgcaattgttccgcaaattcttcatgaagagttacaatttcaaagtgataatttttctccggatcactcatggaaccggctgccagaaaagcaccccggatataggcccttttacagcacgtgttctgcaggactaatccaaaattctttggctcaaaatatttcactgctttcaataataaaacacaatcctcatgtttgtcaacaaaaaccgaataatttcgacttcttttcagatattcattgcgtttcacctgcagttctccatgaataccaaacgtgtcttttagcagcgtaaaaaagcgttttgccaccgacacattttctgtatgcacttttacacagtaggtgccttcattaaaaaggacctctccgcagaaatcaagaataccggcaagttctgcgatcttacagtgtctggctccgctggtgagccttgcgagttcttctttcacttcacttgaaaatgacatttcctacctcgttatatctctatgctcaatcttcactggatatggcagctgttttaatctttctgccaaagcatttgtgatcgtgacggaccgatgcttcccgcctgtgcatccaatcccgatcacaagattatacttcccttccttaatgtaatttggaatcaggaatttcagcatatcttccagcttgtctaaaaatactctggactcctcatgcttcatgacaaaatcctggatcggcttgtcatttccagtcaaagggcgcagattcagatcataataaggattgggaaggaacctgacatcaaatacaaggtcaacatcagccgggatcccaaacttaaatccaaaggataccaccgccacattgaagttagcatattcttcttccctgacaaatattctgtcaatttcagccttcaattcccttgtgagcagctggctcgtatcaatgacataatctgcgtgcttttttaagacatccactgcctcacgctcttttaggattccatcctcgatccgcccgttgcgggccagaggatggtttctcctggtctctttatatcgtttcaccaagattcggttactggcgtttagaaacaggatctcaaacttgacgcccatttcatggaccttatttaattcttctaaaaactcatcgatagatgctccgctgcggatgtcaataccgagggctacattggatatgtttgccgtcttatccagtgtaagctccgcaaacttgcaaagcagcctggtcggaagattatccacacaaaaatatccgacatcctcaagcatttttaatgcgctgctctttcctgctcctgacatcccggtaacaatcacaaacctcatatcattcttcctctaaaactttccgacccgcttcacttccggctccaggtccactccaaacttctccttcacttttttctgtacatcttcgatcagctggagcacatctttggctgtcgcatgatcctgattcactacaaaaccgcagtgtttatcggatacccgcgcaccgccgacctggtatcccctgagtcctgcgtcatcgatcaatttccccgcgaaatatccttccgggcgtttaaatgtgctgcctgcactgggcagctccagcggctgttttgtctttctcgccaatgtatattcatccatctgctttttgatctcggcaggatctccatcttcgagtgaaatggtaccgctcaataccgtatatccgcatttaatcacattgctggtccggtatccgagttccagatcactggcagacagcgtcagaatctctccgtccttcgtcagcactgtggcttcctttaacacctgaatcatctctccgccgtaagctcccgcattcatagtgatcgcaccgccgaatgtgccggggatccctcctgcaaactcaaacccggtgaggttctgtctctgtgcttccttggcgatggaactcagcagtgctcctgcctgggcagtgatctcatttcctttgcaggtgatcttattcatgtttttatagatctgaagtacaattccgtcaattccctgatcgcctaccaggagattgctgccgtttccaaggataaagagcggagtttcatattcttttgctgctttgaccgtacactgtacttcctctatggtctcagggatcacatacagttctgcttctccgccgatgcggaaggttgtatgattcttcataggttcccctgtgagtacccgttctggtgctatcttctgtctcaattcttcaagaatcgtgctcatgctattttattctcctttgatcagtcttgcggccccgtaaattcctgcatcgtttccaaggcttgcaagaatgaattttccttcttttacagcgccgaaggtataatttccatagtgctttttaatggcgtccaaaagtatagttcccgccttggagactcccccgccgatcacaaaaacctcagggtccactgtcagagtaatatttccaaaggccattgccagtttctcacctaaatggtctacctgttcagctgcaaaagtgtctcccccttttgctaggtcaaaaatatcctttgccgaaaagtctgtcatctttttcaggggtgtctctgcgtcggacgcctccaatgccttctttgtctcaaaaacaattccagtcgcagaagcatacaactccagacatcccgtctttccgcagttgcacttgcgtgtctctgccgggttgactgtcatatgcccgatctctccgccgtagccatggctgccgttgatgatctgtccatcgacaatcatgccaccgccgactccagtacccagagtgaccataaccgcactgcggtaatcctttgcagctccgacccagagttctccaagggcggccacattggcatcatttgtcaccttcacaggacatcccaaaagctttccaagttcttctgccacatcgacctgcccccatccaaggttgacacattcgtttaccttcttaagagaaagcactgctccgggcacacccactccggctccgatcagctgatccgtctggatcttgtgcgctgcgatattttctttcagcgccgctccgatatcttcgatgatatgggctccgccgttttcttttcttgtaggaatctcccacttttccacaaggctcccatcttcctgaaacaatcccagctttactgtggtgcctcccacgtcaattccataaatatatttcatgccgcttattcctccaatttcccagtcactcttttgtataattcctctgcagcattgtatcccattttcttctggcgatggttaatggcagctgactcaacgatgatcgccagatttctgcccggacggattggaagtgcatgtgccactaccttatttccaaggtactctacatagttttcatccaggcccagccggtcataatccgtgtctttattccagtcttccagctgaatgacaagatcaatgctctgggtcatcttgacactctccacaccgaacagattcttcacatcaatgatgccgataccccgcagttcaataaagaaccgggtcacagcaggggatgagccgatcagggtatctttgctcacacgcttgatctccaccacatcatctgatacgagacggtgtcctctctttaacagttcaagggcagcttcgctctttccgataccactctctcctgtgatcagaataccttcaccgaaaacatccactaaaactccatggatcgaaatcctcggagccagttccacactgagccagcggattacttccgcagtaaattctgaggtagaatccttgctgataaaaacagggactccatattttcttccgaaattaatgatcttttcacacggttctttcccccggcagaataccaggcacgggatctgggcactaaaaaggcggtccaggatctggtcgcagttatcttccttctccaagatattgttgatgtatatatattccacatttccgatgatctgcaccctggatgatgagaaatggtcaaaaaagcctgccagctgcaatgccggacggtttacttctgcctgtgtaatataaatgtcattggtgttgatgtccgggatcactgggatcaactccagcttttttgccagttctgccaccgataccttgtattcttcgctcataatgaatcctccttgtccgattgttattcttagtttatcacattttcttcctgagacaaatggaaaaacgaatagatttcttttgccgctttccgagtcatgcccggcacctgcatgatctcatcttccgtggcatctttgatgttttgtatctgtttgaaatgtttcatcagctcttttcttcgctttggaccgacgcctttgatatcatcaagcacagaactgacttgtccttttgctctcagtgaccggtgatactcaatggcaaaccggtgggcttcatcctgaatcctagtcacaagcagaaaagcttcacttcgttttggaaagtagatttcatcattattataatacaatccacgggttctatgattgtcatctttcaccataccacacacagggatttccagattcagatcctttaaaaccctctccgcaacgttgacttgtccttttcctccgtccatcagcagcaggtccggaaacttcgtaaaactgccaaattccaggtcctgatttttctctttcaactcctcgatctcccgctgtccgtgtaacagtcttcttgtaaggacttcttccatactcttgtaatcatccgggccgtccacagacttcaggcggaactttctataatcccgctttctggctttaccgtcctcaaacacgaccatggatgccaccgtctgaaatccgctgatattggaaatatcaaaagcctccatcctgtgtagtcccttaatccccagaagctgctcaatttccttaaccgccccgattgtgcgctgttcttcccgtttcagcttttccttatccctgttcaggacattccgtgcattttctttcgccagttccaccagacggtgtttttcacctcgtaccgggatcctgatatggacacggcctccccgtttcttggacagccattcttctacgatttctatgtcatccataccacattccaggaaaatctcccctggaagatatggtgtccccgcataaaactgctttacaaatgcactcatgagctcctgatccgaagtttcctcgtcctgggtcatatgaaaatactctcttcccaaaagctttccgtcccgaatgaaaaagacagaaactactgcatctgttttttcttttgcaaaggcaatgatatccctgttttcaaatccatggctgttgatcttctgacggtctgcgatctttgcaatgcttttcagcagattcctgtactctgcggccgattcaaattccagttcggcagccgcctggttcatcttttcagtgagcatttcggatacatctttataatttccgtttagaaagctcagtactttctcaatagatttttggtaatcttccctagaaatatatccctgacacggcccttcacactgcttgatctgatagtacaggcaaggacggtcttttccgatatcctttggaagtttcctgctgcatgtcctaatcttaaaaagcttcctcagcagctcaatgatatcctttactgcccccgcacttgtatatggcccgaagtatttacacttgtcctgcttcatctttctggccagcatgatccggggatattcttcattagtggtaactttgatgtacggataattcttgtcatccttcagcatggtgttgtatttgggccggtgctccttgatcaggttacactccagcaccagtgcttccagctctgaatctgtaataatatactcaaaatatgcaatatgagataccatatgctgaatctttgtggttaaatttctgctgccctggaaatactgtctcacacggttgcagagtttgatcgccttacctacatatatgatctcatctttgtcattatgcatgatataaaccccgggctttgccggaagtttttttaattcttcctgtatgttaaacatcctggctctcctccatcatcccaacatgtgtgtaccatgatatcatactctaaagaaacagaaaagaacaaagtagacaccccccatcataacacccatagggcttttttattctttcggaagctgcaacgactatcaaaagctaggactcaagcagacctatggaataaaaaatagtattagtttctgtgctattaaaaagtcatgaacattgaaatgtgatttcgctttcttatctgttacatagcggatttcaaaataaatgatatggatttattgtattctgcgagctatacttaatatcaaacagattggcattaatgactatttctgaatgataattgtcgaaacaaggaatacctattgatacactcgcgaaatttacaagctgtgttataaaatacaagatagatgaggtacactatgaatagaatttttgatgctcctgctcctattattaataaaaaggaagcagacacactcgatattttgacagaaaaatatactaaacttattgaacccagcaaacttgcaaagttaggtacaaaggcaggacaacttgtacccgagaaaattaagaaatggggaattgatattagccttaatatatcggagaaagaattatattctcaaatgatgaatgtaatcggaagtggatttaaaactatcgaggaacaggcggctaaattttctattaatgagaagcagatcatcactaaggtaaaccaaaactctggttttgaaatacaaaaattagacgaaatttgtttagtaagaagttatgacatagcaaaattggtcaatacatataaaaatcaagatacatttgtcgccacaatagagggtggcggaacaggtgcatttggattttggggattgccttttaacattgttttaagcacttttctgtattttagatcagtacaatcaatagcaatgttttatggatatgatgtaaaaaacaatagtaccgaattagtaatagcaagtgaagtatttacaaacgcattaagtccaagtacaagcgatgccaacaatgaagcaacggctattattggtaaaattatgttgatgagccaagctgccgttgtaaagcaaacagtgaaaaaaacatggacggatatggcagctcgtggtggaataccattattgttggcacaaatgagagcgctagcacataaatccgcacaaaaggcacttcaaaatgtaggggcaaagggattggaaaacaacattttcaaagaagcctttgagcaaattggccgaaaactgacattaaaagcgataggaaaagcagtgccgattgcttctgcagttacgggtgcattgattgatacggcacaaatgaaaaaagtgcttgagtatgccgatatattctatcagaaaaggtttattatggaaaaagaaagtcgtatttcaaatttaataggtgaataagaaattttaatagaaatggataatctaagtaaaagcatttctccttgaaatgttacacagttaaagagcattttgcgaaaaaggtatcagcgccaattcaataaaaataaccccgcaatgtcaaatgcggggttacctatttaatgaaaagagaggattaatatatatgaaaaactatagtctaagtatatcagaatcctccccggaaacaatggatagaaaataaacaattctaaacaaagtataaaatgacctgaagaaagtcttaggattactaataatttctgacacagcagcagtttactgtagaacttactgggtaatcagaatcttaactatctgtgtcccaaatgtgtaactgttttcaggcatccatcttttgacttctttcttattttgcttcactgtttttaatttcatggttaaagtgacttctttcatttcttctgtaggctttatttctttaatcagttccgccattttggaaagaatgtaggggcctaactgttctttctttttgatttttcctgattttatagcattctgcatatctttcataagctcagactgtatttttgcaaggttaatactctgtgatttcagaatgactgttgctgttccttcctcttcgtccttttcatctgttttcacttcatatttaagctttgctaacgcatggagtattgaatcaataactttatccgcgtcctcagatttaaacatgcctccggcataatttgcagatgtcatgaaagaagacttcatacttgtcttataggtctttaatgccttttttgcgtctgcttccgtaataccatattttacaagttcctctgtattacctctggtatacaaaagataatatgcttctgcaagcttgtgcggctccggaatttcctctttcttcttgcatccggccaaagccagagaaatgattaaaacaaggcttagtaataccgccaattttctcttcatctgctttttcataacctgttctcctctatcttagaaaatgttttaaagcaaaagccagctgcagcagagtctgtcggctctgctgcaaagctttttattttacatatttgactatgtattttccgcttgtattctttgtatttttggttacctttacataataggtgccttttgataattttcctttgaaagtaatataacttgggctgtatgccgtacgtgaactcagctttttctttcccttgtacagcgttgcagtcacacttcctgaactgttatatgtagtaaccttaaactgtgtagaacgacgtttactgactttaaacttgtaccaatgggtcttcttcttagcatctgaagctgtcagcacatttgtcttggatttcttacggctgatagatttggatttggattttttggttgcatacttgcctgtgtaagctttttttccatatctggcagtaaaaatatcatactttgatgttcctgagataacaagacgataactccccttacttagtgcatgatattttctaagattcgaattataactatatttctgatcagttactcgcacccattttttaccgctctttttttcaatatgactctttaaagagtagcctttatctgaaacaagatctgtccaaacttgacttctcttggaaacagaaaaattctgataattatttccaccatttcctgctatatatttagctgttccagacaaattcccattattacttgaataatagaaaggtatatatccagttgcaacgcttgaattataaggtgatgatacagttaatctatatgtcccttcattaacataattggcaatcactgtgccttcatctgaataaccagaagctacaaaatttcctttactgtcagttaatgtgacagtacaattcgctggtgtttgtgtaggcacacccgtagatgtaacgtaaacattcgagaactttacacataactttccttttgttggcatataaatattagatattaattgattgctgcctgttattgggctagcaacattaaattggccattttcaatctttttgtttatagcattgatacttgctcgagtgttgatatgataagcttttaaattagctactgaccgaacactttttgatttctttgaaaccttggtgctttgagcagtattaaaaccctggatatcttttactttttggacttcagaggacaactgtcctcttttgttaaccacttcactagaaatgccttccttcttctccgctccaaatgctacagtgctgaatcccaacgaaagggacagccctaagcacacaacggcttttaacgctcttctcataacgttctctcctttttatcatgtctttgttactgtgtatctcacaagtcccccaacctcaaagaacacagcagttaatagctcccaaattaatttatcatcagaaatattaccggttatccaccttttcagggtacatgtcatggtgagccagtctgtcaaaagcaatctgctcccacggcgttccctttttcccatagttacagtatgggtcaatcgaaatcccgcccctcggcgtaaattttccccatacttcaatatatttcgggtccatcagtttgatcagatccttcatgataatattcatacagtcctcgtggaaatcaccgtgatttctgaagctgtacagatataacttgagggatttgctttccaccatcctttctcccggaacataggaaatataaacggtcgcaaaatccggttgtccagtcataggacacagacttgtaaattccggcgcattaaactttacaaaataatcattgtcaggatgcttattcggaaaagtctccagcacttccggtgcataatcatccggatattttgtctgctgatttcccagcaacgtaatacctcccaattccacattggttctaccactcatcttaattcctcctgttttgtttaaatcacaggtcttcatatatctgtgattcttttaccagtatatcatattttctgctctttttttagtgttttcactttttctttttaaacgaaacgaataaaatactggctgtcacgccgcataggaatatgtatcttaagaactgaccagagtcactggtttgtggattctttgatacgtacttgagtttatctggctgacttgcttttttgggtttccttggttcttctggctcgcttgcttctgttggctctattgatttaacctgatgagtatttgttaagataaagttcccatccttattaatttctacttttcctgtgtagccatctggaatcttagtttccttaatggaatattttatttctttgccgtcttcaaatttcgcaagctctgtccatgtataagaccattggttatctgagcttagtttcactgcttctccgactattttatcacccgcatagagttgaacaaaaatctcgctgggacgaataccgtcctggtcttccttgtcatcccatatcttcgttacagactttgtaacagtagcttgtgtgtttgtaataaggaacttaatttcatttccatcttgtgtcttctcatactttgtcttaaatccagacaccttgtgttctttaatatcgtaagtatattgggttggcaaatctttaaaagtatattcccaatgattctcttcgcttagtttcactgtttctaatattgtcttattatcattttcatctatttttattaaatccactgtaatagatttgggaacagttccggatgccgtattccacttctttttaacagataggttatacccattgtcttctgtacctatgacgacactgccattagcaccaataccgccgcctctttttgctttatttcctgtgacaatcacggttgcttgctttcgcgccatatcttcagcattctttgcagttactgtttttaacgcataaccttctaggctattgctgatatctttaatctcatcgcctgaattatttggatcaaatctaggaattgataaatcaggttgtccaagaacaccttcagcgacaacaccgccgtctctgtagtaagaaactttacctgcacccaacattctatctgaaaatgtagtagtataatcagaagctctcggcacagaaacgaaatcatcccctgccgcatcggtctcagcagtatttccgaacaatgcgcctccgttatttacaagaattttaacacttcctgtaggacaagtccaaatcccgccgccaagcagggaagcagtattatctgtaattaacgtattatacatctgcagttgatagggaacactggctacatagattccaccaccctgatcacgggcagtattatttgaaatgacaccggcattaaatgttcccatgtttgtggccagataaattccgccgccaactccgtcaacacctccagtactattaagagcttcattcgtgctattacctgagacaacaccgccattcatagtaaaggaagccgggcaatgataagtcgttccccactcttcaattttaaaccctgcgttaccagcatctgatgatataaaaccatcattagctgcgataccgcctcctacaggtgcctgattatcagttatctgcccctgattcattttgaagtcgccattacatataataaggacaccgcctccggcatatcgtgatgtattttttgagatgacaccgccgttcatttcaaaagaggctacagatttataatctggctggagccatgtccctacagtaactgctccgctaaggtaactgctataattattcgatatctcaccaccattcataataaaactagaagcatcttcattcctgccattacggccaccctctacgaaaacttcacaactcaaatcgctgtttcgattatttgctatcagaccgtcatttaatacaaatttacttccgttccgaagaaatattgtatttacctccatatctgtataattatcaaatacattattagatatttcaccgccattcataatgaagtcagcatggtcttctaagaaaacaccggaagatgcatcattgtttttaatcgtacctccagtcatggtaaattctgcattttttccgcttacatgaataacataacaagtatgctgagtcatatttcctgatatcattgtgaagtttcctaaaacctcgattgcagatgctaccctcagccctgtctgatatctttctcctaccttatttccgtcaacggttattccatctaaatacagctggccaccttcctcgatcttaatcatatgagcctttttatcaagtccactcgtgcgctttagacttccatttcctgcaaaatgaatgatctttccatcaggtattacaatttctttctccacgtcaatacttgtatcaatggtcaacgtagttttttcaccatcttttgcagctatgatactattatttaaggtatcaatattcgttatcgcttttaaaagcgatgactttgccaatttttctttagtcgttgttttttctgtttttgaactagatgctgtttcgtttttggctgtttcctctttgatttccgtaacttctacaggtatatcaaccgataatgtttctaattcatcaggtttctctatattttccatcttttcttttttgtagaatatccggaactgatatgttccgttctttgataccactgtttgaataccggacccgttatatgcatgttcctttccatctggcaggagtactttatctatttcaatcttctccttctctttcatatccagtgaaagctctacggatgctttatctttgtcaaaagtcttttttaatacatattgaacagctttattctctccctgaatctcacttggatttttcgcaaatacttggtttgctgcttgtaacaaaacactgcatatcataataaaaatcaatataattgaccaatgccaatattgagatttctttcccatttgttttcctcccgtcttttatatctaaaaccgcttatcatgatgtaacgtgcaatagaaatttctatcaggacagttttctgtcgcaaaatgataacaatacttgcccccctctccaaatacgaatctgaccttatcacagttacttttcagacagagagatgtggaaaaaaatcagacattttgttacacaaatgataaaataaagatgatccataaacagggaacttttagatactttttacagagagaaatgccggaacaaaaagtctacaatttgttccatcagacgaaaaatttttcttatttacggccgttttctactcttttaacccaacggccaaatgtaacatgattgctatttaacattttaccagcttctcgctggcttatctgttctgatttccataagtcatagacttctttaaaaccatctggcaatgcgtttttaggtctgccaaatcgagtacctttcgcctttgcttctttgattccctccatctggcgctgatgaatattttctctttcaatctgcgcgacataagagagaatttgtaaaaccaagtctgctataaactttcctgtaattccattgacttgatttctggtatccaaaagcgggaaatccaatacaataatatctacatcttttgtcttggtaagataccgccactgttctatgatctcatcataattcctgcctaatcggtcaatcgatttgatatacagttcatcacctgcggcaagtctttttattaatcgctgatatctgggacgattaaagtcctttccggataatttatcaatataaattctttccttttccagtccagctttctgcatagccgacatctgtcgatcgatattttggtctcttgttgacactcttacgtaaccatattttttcatctgtaaaatcctccaatcttagtaatttcaattcttaattatctcatgtcttaaccctagaatcagcggcaattatttccatcctatgaaaacatcgttttgaaaccagggtactgcccgatgccaagattgatcgatgattggtaaatgggatattgattatcagattgccagtcttgaggctttaaaacctaggagaaaagaactgacagagaagattttgatgtaccattaataatggatgattgtagaaatgcgaaaagaaaacaaagactttggatattgaaagaccttttattctgaacaagaatggtcctatcagataaaaacgtatagaaaagcactgaagacagagtaaatccttcagagtatatcaaggagggaggactattgaagaattgaagatttttctgtgctcctttcattagtaattgtagctcctcttatggagtaaaaaatattctgcccagaagcaccgcacctccgagaatcacgatacagcctgcggccgcaaaaataaatcctcgttgtttttctttatgttccgcctttttttcttctttccctgtttctttcgacgaaattgttttctgccggtccgcgttttgttgttcctgggtgttctcttcttctgacgcgatcttttgctgactgcttttttccgtcttccttttttgtattttgcgggtccttgtccctgctgccgtcttgacactgcggttctcagcgatactctctggcttctctgtactcttgtgtcttttttgttccttctgggactggtctttttcttgatctacggtctgcccgcctctgtctcctccagactccccgctgatggaagacccggaggaaccatggtctgcatccattttccaagcggcgctggtgcctgagaaaatgctgtctccagaaacttttgcccgcatataaaatatattctctctgaccggaatgtcaaagacaaaaccaaacaccccgtacggctcaggataagtctccccttcaaggatattcgtatttccgttttcctttgaataagtcttccagttcttctgatcctcactgtattgaagaaccatggagtctgcacctgcaggaaaaggcatttccaacattcccttcacccttccccctgaatttaacaggatcttataactgtttaaatacatgccctccggccccactgcaatcactgccgcttttggactaatccctgcggagtttagatacactccaaacagatcactggtcataagccgtcctgccacaatcgtgatccctgcctttgaagcatctagatttgaaagctcccattttattggcactgaaatcctgcttttttcctttgtctgcgcattttccacgtaaacgcccgcattttctggcagcagggatttcagatcagagcctgtcctgccgatggctggagaaaggccgtcaatatcgtatatactgtagactgtatttttcattcctgaaatctcaggaatcaatttggaatcagtgctagacacttcagaacctgtaacactgaacgcatttccagagggatcactgacagatgaagtaatgcggcaacggtttacttcggtttttcccaggtttgtcaccccccaagcttcctgttcaccaaaaacgctgatattacaatccgttaaagtaaccttctggtcattattattttttatgccggcaaccggtccagttccttcggctctgacatccagccgttcaagaataagaggctctcttgggccatgataaatcccggagatatcctgtccttttatcctgatcttaaaccggtctaacggatcagaagaagtttgaaggcccccacggactatttggactgcacatgcataatcagactcatttacaatcgttcctctttttaatatcagctgggaatcatcactgtttgtcatcaatacaaacatacattccccgtttattgtaagattagggttatcaatcaccactttactatttgcaataattccatgggccccgcaatcgatccgtatcttgccgctgccgtcaaaccggatgggatcatcctctgtccccttagtcaatttcagatcccctgacagtgtatagacagcatccgtatcatttttatgtttgtcataccatgctagaaatttctcttcatcttccgttttcggcggcgtccatgcaaagcaggacacagactgtaccagaaccattgacaatactgccataacgataaaaactgtctttttaaaatatcttttcatctgccctctccattccccaaattctctgtatcatagtataccttatcgtgcaaagcacgccaagcccgaagggcatacactacatccattttttacatggttggattaaaagcattttaaaagccgaacggaattatgtaaaaaatgatttttatactgtttttcgtttcacaataaataacaacattctccgattaaattgcattggaactctattatgtttacaatgatattaacaatcttaaaaaggagtccgcctatggaacgtttgctttttgtcgatgatgatatggaaatccttaaaattaataaagtttattttgaaaaatgcggttatctaacggataccgcgacagatgccataacagcactttcctgcttatcggaacacgactaccaatgtatcatcctggacattcatatggaaaggacggatggtttttgtctctgccgcacgatccgcgccaattataatataccggtgatctttctgacaaatctgacagaagaggagatcatggtggagagctttgactgcggcggcgatgactatatcacgaagccgtatctcttaaaagagctggaaatgagaatacgggcaaggatcagaaacgcaaagcctgttgaaccagccagccgcccctccgggctttctatggacaatgaacagaaacaggcatatatcggaaatcttcccctgaatctgactgtcaatgaatttgagattctcagattccttatggaacacaaaggtatcccataccgccaggaagagatttaccgggccgtatggggagagacatgctacaatacacacagcatccagatcttgatcatgcgtatccgaaaaaagatccaggccctgtctcctgagaaggaatatataaaaacacagtggggaaaaggttatattttcacagaataaatcaaacgtcatatggagtctgtcatgaaacgaaagaaagagaaatcccagaatacaaaattatctgttctgatccttatcgctgctctgctctgtgccgccttgatcttctccttttgctatttcctggacaataaatatcagacgtcaaatacagatccctccaaggggctggtcccccttgcgttccagtgggatttttactccggccatctttacactccgaaagaactctcctcccaatcggtccagtctccggaaacaatctttatcggccagtttggcaatttttcatctcatcagcccagtcattccccttttggaacggccacataccgcaaagtcctgaatctcggcacttctcaggatggatggctgcttcaggtaccggagattttttcttcctgccgaatctatgtcaaccaaaagctggtccgccagatgggcaccccggacgcgaaacccgtctccagacatatacaaaatacactgatctctctcccctcaggaagtgtggaattagtcattcagacagccaatgatacccattattacagcgggcttacctatcctcctatacttggtacaagcggtatggtcacaaatgccctgacccaaaagctgattttttatgctcttttgtgctttttcccgctgggagccgctgttatttccatgggtgtctggatccgaaaaaggccggacccagtctttgtggcatacggcctggtctgcctatttttttctgtccacgtcagctacccattcatccactggctcggatgggatctgggcggcatctcctatctcattgaagatgtgtcatattttgcaatgctgtcttgtatggttttgctgacaatccggctgtgcagcgggattctgccgattaagcttcatatatttgtttatacgtttactgccctaatggctgtgtccccggttatttttacctatgcactgttccctgcgttcccaagtgtggtcaatgtatatggaaccattgtttatacttccaaattgatggtcagcctctatttagtccttctgtccttactgggagctgtgaaggaaaagtcctctatatggctgctcgccggaaacgcagtctttggttttggcctttttactgacttatggaccgggggagcatacgaaccactccgcttcggatggcaggatgagtacagcggttttctcatggttctgttctttatggttctgatcatccgttataaccgggggctgatcgtcaaaaaccagcaactcacccagcatcttcaggaggaagtggaggcaaagacagcccacctgtcaaagatgctggaggaacgcaaagaatttctttccatcgccgcccatgacttaaaagctcctgtgtcggccattaagacctatattgattttatacgtgagggcgggatcaacattgatgaagaattagaacaatatttagagatcatagataaaaagtcctcccagattcagagtgatatcagcagccttcagatttttaatgcagaggacaggatccatgagccgccctgtctcatggactgcaatgaatttctgtcctatgtttacacagagacaaaaccgtacacagacgctggcggtatctattactatttacgtctgccggaaggccgattttttatctatcatcagaaatcccgccttttccgggcttttgaaaatctgatcctgaacgccaccgaacacactccgccggaaggttccctgaccataaccgctgagtattctgataaggaagcggtcatcacttttactgatactggagaaggaatctctcccgaagacatgcctcatatctttgactataaattcagcacaaaaaacagccccggcaccaggggtctgggcctatattttgttcggatctctttggaggaatatagcggcaccataaaggccatatcagaaaagggcagatatacagcctttaccataacacttcctctggcgaaacaagaacattagaaaaatttgatttggaccccgtcttatccatatcaatgagacgggaaaggccgattgacttctgtcctgttttgggctactataaaagcagtgaaacacatctttctgaagccagggtactgcccgatgccaagattgatcctttataagccaaccacagagtttcccaggtgaaactctgttcttatactgcgatgatcaggcatattcctatgggatatgcctttttattttaaggaggttcataatcatatgaaggaaacacggatcgcgctgatcggtattatcatcgaagaagaaaaaggcataactcccaccaatcagctgctgcatgaataccgggattttatcgtgggcagaatgggcattccctaccgggaaaaggacatcaacatcatatccatcgtcttggatgcgccggaaaatgccatcagcactctttccggcaaactggggatgatcgatggaatcagcgtcaaatcaatgtttgcaaaaacaaaataaaggagaaaaattatgtaccagccaaattcaaaagttgcagaagaattcatcagcgatcaggaaatcaaggatacccttgcctacgcagatgccaataaggataaccgggaactgatcctgtcaattattgaaaaagcaaaaaagctgaaaggcttaagccatagagaggcatctgtcctgctggcatgtgaggataaagaactaatgcaggaagtctttgacctggccatcaagatcaaggaagagttttatggcaaccggatcgttatgtttgcgcctctctaccttgcaaattattgtgtcaacggctgtgtttactgtccataccactataaaaataaacatatccgcaggaaaaagctttcccaggaagagatcaaaaaagaagtgatcgcccttcaggatatgggacacaagcgccttgcactggaaaccggggaagatccggtgaatatcccgattgattatgttcttgagagcattaagacaatctatgggatcaaacacaaaaacggagctatccgccgtgtcaatgtcaatatcgcagccaccaccgtggacaattataaaaaactcagggatgctggaatcggaacgtatattttattccaggagacatatcataaagacaactatgaagttctgcatcccaccggcccgaaacataattacgcttatcacacagaagctatggaccgtgccatggaagccgggattgacgacgtagggatcggtgtcctgttcggcctgaatatgtaccgctatgactttgcaggacttctgatgcatgcggagcacctggaggccaggtttggcgtaggccctcacacgatcagtgttccgaggatccgcccggcagaggatgtggacccagatgagtttgaaaacgggatcaacgatgatatctttgaaaagatcgtcgccatcctccgtgtggcagtgccttacaccggcatcatcgtttccacaagggagacaaaagagtccagggaacgagtactcagggtcggagtgtcccagatcagcggggcatcttccaccagcgtgggcggatacgcagaaccagaaaaaccggaagacaattctgcccagtttgagcggagtgacgaccgtactttagatgaggtggtaaactggcttcttgacctgggccatatcccaagcttctgtactgcttgctaccgtgagggaaggaccggcgaccgtttcatgtcccttgtaaagtcaggccagatcgccaactgctgcgggccaaatgccatgatgaccctgaaagaatatctggaagactacgcctctgaagatacaaagcaaaagggcgaaaaggtcatcaaaaaggctttggaaacaatcacgaatccagtggtaaaacaaaaagccacagaatatattgaaaatatccacgaaggtaaacgtgatttcagattttaggagaactccatgtttgaatctttaaaacatcatattccgaaacggatcggagaagagaaagaaacatcctttgcggtactcatccccctgataaaaaaggaggatgggtaccacgttttatttgaagtgcgcgcaaagcacctgaacaaacagcccggagaggtctgttttcccggaggcaaagtagaggccggggaatcaacctacgaggcagctgtgcgggaaaccatggaagagttgtttgtaaaaaaagaaaacattcaggtatacggagctctggattaccttgtaaccccatatcagacccggatagaaccgtttcttgccgaactccatgattatcacgggcagttttcccgggatgaggtggattccgtctttacggtgccgctctccttctttttagaaaatgaacctgagtattacagcagtgttctcatgacaaaaccgcaaaaaaatttcccttttgccgacattccaaacggggagaaatacccgtgggcaaaagggaaatatgaggtttgtttttaccgctacaaaaaacggattatatggggcatgactgccagattactgctgtataatattcagtatattcggaattaactgcttctttctggacataacgccgggcagttttgccgtacagccttctgccctggctccgaagccctgctctatgatactgttgctcttatccccgaccatgataagataagtggtttcctctaagatattggtcagcataaagtaaatcatatccagcccctgttcatttctcacagtttcagcgtacggtatgatcttatctttgatctcttctaactctccttgatccagggatgtgatctgtcccactccaaaagagacatctcccgatgagaatttcttataatcctgatagaatatctcatcggccgctttacctttcagatcgcttcctgcgcggaacatctgcttcgcatactcttccacctcgatccccgcaatatcggccagctttctggcagcagcctcatctaccggagtacaggtcggtgaacggaacatcagcgtgtcagaaaggatcgcagaacagagcagccctgccatgggttttgtgatagccacaccctgctcctcgtacatctgcgtcacaatcgttgccgtacatcctaccggctggtttctgaaatataccggtgacatcgtctccattgacccgagacggtgatgatcaatgatctccaggatctcacactcttccagtccctccactgcctgggacagctcattgtgatccacaaggatcatttttctcttttcaaatcccagcatacgccgtctggatgccaggcctaagaattctcctttggcgtccagcaccgggaaatagcggaatctctttttggccatcagcgcctttacatcatccacataatcgttggaagaaaacgtaatgatattcgcctttgtcatgacataggaaatgggcagagactggcacacaagcctgctggcagtaaaggtatcatatggagtcaccaaaatgcggcatccctttgacactgccatattctggatctcgccgctcacctggcttcccatgcagacaataatacactgggcaccgatctcgatggcccgcttctgtgcatcgtccctgtccgcaaggattacaaggtctccctctgtcacaaactgctccatcttgtcgatgctggcagcagaaactgttacctttccgtggtcaatagtctcagaaatgtctcccacagtcatacttccatccagcgtttttaccagattctgatacggcgtccgggcttttgccaggatctcgctgtcatagacatccatatccgcatgggcgatatcactgatggtggccatacccttcagccggttgtcctccaaaacaggaagagccacaagcttcagttccttcatcctgtcgccggcctctttgatggatatatcctgcctgaccccttccacttcatggagagtgatatcactcatcctcggcctgatatcacttaaaaactccggggcctttacattaaactgctgcaggacaaaattggtctctccgttgactttgcctgctctgcgggcttcaaatccgcctccgttcacctgattcttcagattcgcgtaagcaattgcagagcagatggagtccgtatccggattcctatgcccaattacataagtacttttcatggctcctccttttgttccattggaagtctgacaataaactctgtgaaatctttgttgctgttcgctgtgatcgttccctgatgcagttccacaatctctctggcgatggcaagcccaagcccggccccgccggtctccgtggaccttgcctcatccagccggtagaacttttcaaataaattctcaagtttgtgttttggtatttctttgccctggttccggatcctgatcacggcctcatccccttctcccacagcgctgacctcaatagctgagtttaaatagcagtaagagacgccgtttctaagaagattttcaaagaccctggccagtttatccggatccccgtttatcaatatagaatcctctatctcagtgcgacaggtcagtccccgctccttaaatacaggttcaaacgaatccagaacctgttccagcaaaacgtacaaatagaatgtctttttctctaaagttatattctgaagattgtagcgggtaatctcaaaaaactcgttgatcagatctcccagccgtttcgctttctcaagagaaatgttcgtgtattttgccctctgttccatcggcatatccggcgcctcgttgagaagactcaaatatgctatgaccgacgtcaggggtgtctttagatcatgggccaggtagaccaccaggtcgttcttcctctgttcgctctcctgggcttgtcttcgttgttccttcagattcaccttgatctcattgagacggttttccattggctgaagctccggctccagttcgatcaaatcactggaatccgtgagaatcatatcgatcccagactcgatctgtcttaaatacgtggtaaacctggacataccaagataaaaactgcacaggaataagaagataaaacccgtggagatgatcatggtcttattatcccagaaaattgcgcggtacaaatgaatggcgctctcattgtcgaaaccgaacttctcaaaaaaacgcaccatactgtccgcgaacggcgcctgcaggactccgtccacaaatacaaatataaacagataaccaaagatacctacaagaaggctgatgcccaaagtctgaagcatgatcctgatctttaggctccggtatttgttccatttactcctcaactttatatccaactccccagacagtcttgatcaattctttgtgtcccatcacctctccgagtttctccctcagatggcggatatggaccatgactgtgttgttattattcttaaaatacttttctttccatacttgttcaaacaaattctcagaacttattacctttcctttgttctttgtgagaatccagagaatggaaaactccaacggcgtcagcgtcacctcatcttccccatacaggcactggtgtgtattcttgttcagcaccaagcctgcaatctccagagtatcctcactgctctgtccgcttccgtcgttataacggataaacctccggagctgtgctttgaccctggccattaattctagcggttcaaatggcttttcaatgtaatcatccgctcccagtgtcagcccgttgatcttatccatagatgctgtcttggctgtcagcatgatcacaggaaagttgtggtccttgcggatctcctttaagatctcaaaaccatcgatatccgggagcatcacatccaggatcgccagatcgatctgctcctgcttcacacattccagtgccccagctccattgtaatacttgaacacctggtaattttcatttttcagatagagttctatgaaatcagcgatttccttttcgtcgtccactaccagcacgcttgattgtttcattgatacctcctaagtttctttgccgccattgatcacctgaaacggcacgtcttcctgtttcctggccaaatccgcaagggtatggcccttttttccatagatcggtgtatgataaaaaacagtctttaaacagtcatagaataatttctcgtcctcttcctctgtatccaaaagccttgataccttcacgacagtgtccaggtaactggctccgttctggatcatgagaatgatggacttcatgatcaccattgccttataccggtcatcctcaatctcctccagaatataggtaaacatctcagagactcctggccatccggttaccccgtttcccatggcaagcgccacatactcgtcttccgtatactctttgaaactgagatcctgctgttcattccattcatcaaacacttcgttcctgtccagcacctcgcggctcaccataaacagacgctttgtcttttcattgcgcagaagaataccgcttctccagaatacgattcggattagaagaaaacgctctatctcaggataagagatcttctcccctgtcacttccacaaaaatatcatagcaatagtatacatccaaaataccataggtaaacaacattccaaagatgacctgctcccacctggaatagcgctccatcacctctgctgatttgtggctttttaagaggaaatagaacatatcctcagcctccagattgatggcaataaagtcttcctccacatggacaaaccccagataccggagctgctgcagatcgttaaaattcgtttccagggcaaagcttccttccctctgctcccaaagttcaaacaagagctccacggcctcagactgcaacatctcgagaagtaccagtgggtcctcgctgagcttttgcgcaatctgccttgccagttctaattttgacgcgtccgcctgtaccggtaaaaagaggcgttcacaaatcaccattaaattccttgtcttatttgtagatagttcttccacatacggccgttccgaaattaaaatcctcgccatactgaccacctctttttctaatttattgtatcacaattttttgatttcttctattctttccagtgccatatcataacccatctgataggtatccctgagcacatcaatatccttctcaaagctgtcaatgggacggtccggccttaggatgacagccttcccttgcttttccagattctcgcagtaatggactgtgcgattatactccacatgacggttcaaaagcaaatccggaatcttcggatactttttcttcagcagcgttgacgtgaccttatggctcttgctgagttctttgcggtatccttttggtctcgtaagaacgatcagatgcttgtcattgccgtcacggatcgctttcctgaccgggataggatctgcgatgcctccgtcgaaatacggaaccccatccagcttgatggccggaaatatcagcggcagggcacaggtcgcccggagcatggtgcactctttatctaaatcttttccgtctttatattcaatctcaccggtcagtgcattggtcacacctaccagtatctttccatcatatttgtaaaatgtatcccagtcaaatggatataatttgttggggatcacgttgtagacaaaattcagcccaaacaggcttttttctttgatgagatttttctttccgatatatctggaatcatttctgtggtttagaagaatctgcagattcctctccctctgcctggaaacataagaaaagccgtcacagatgccggcggatactcctatcacatagggaaacatcaaatcatggtcgagtagggcatccatcacccctgcgctgaaaatcggccggaatgtaccgccctccaatattaaacttgccatatctcttcactcctaactgcatttgggcattcccggaataactcagaaatgcttcttctttattataccacaaaaactggaaacttattgtataaatcatatgcctctactacaatattcaagttcttaagatctgtacaccgccagcaaaatatgccgaacgaaatcaatgatatagacggcactgcatacatcattcagaccattgcactttctgaaaaacaatgatacaatacgtaagatgactttttaggtcatatttgaaactaaaatgggagcttttacgggctgagaggaagggatatccttcgaccatcatacctgatttggttaatgccaacgtagggatttaggtgcttattgtaacggaatttactgtaagtccatgatcatgcgatgaatcgtttattttgtgactgatcatgtatataaaaagaaatgttccgaaaactaaataatgcattttagattccctcccgcctgattgaaacgaggaggttgtaagatgaattacacaacacagatgaatgccgccagagccggcatcgtaaccaaggaaatggaaacggtcgctgcttacgaaggaatggatgtacagaagctcatgggtgaggtcgctgctggaactatcgttataccggccaacaaaaaccaccgttgcttaaagccatttggtatcggcaattccctgaaaaccaagatcaatgtcaaccttggaacatctagagactgtctgaacctggacgtagaaatggaaaaggtaaaccaagcagtcttaatgggcgcggaagctattatggatctttcttctttcggggacacacagaccttcagaagaaaacttgtagccgaatgccctgctatactgggcactgtgccgatttatgatgccattgtatattataataaggctctgaaggatattacctcaagggaatggatcgatgtatttaaaatgcatgctgaggacggtgtagactttatgaccatccactgtgggatcaaccgcaataccgcagaccgctttaaggccatgaagagacagatgaacatcgtgtcccggggcgggtctttgatctttgcctggatggaagctacgggcaatgaaaatccgttcttcgaatactatgatgagattttggacatttgtaatgaatatgacgttactttaagtctcggggacgcctgccgtccaggatgcctaaaagacgccagcgatatttcccagatcgaggaactggtcactttaggagaattgacggcccgggcctggaaaaaggacgttcaggtaatgatcgaaggacctggacatatgcctatggaccagatacaggcaaatatgaagattcagcagactatctgcaacggagctccgttttatgtacttgggcctctagtaacagacattgcacccggctatgaccatattacatctgctattggcggagcgattgccgctgcatccggcgcaagctttttatgttatgtcacaccggcagaacatctgcgccttccgaatgtggatgatgtgaaggaaggcatcatggcttccaagatcgcggcacacgccgcagatattgccaaaggcataaagggcgccatggactgggacaatcagatggcagaggcaagacaaaagctggactgggaagctcagtttgatctggctctggaccctgtaaaggccagaagataccgtgctgaatcaaaacctgagagagaagatacatgtacgatgtgcggaaaaatgtgttccgttcgaaatatgaatgctgtgttggcaggtgaagatgtcgatgtagtataaacaaaggaggatttcacagatttatgaatgaagaaagaggcggcttttccagcaggatcggctttgtgctggcaactgcaggatcagctgtaggactaggaaacatatggagatttccatatctggctgcaaaatacggaggcgggagcttccttttgatttacctgatactcgcggtaacctttggatttaccctgatgatcaccgagatagcgattggacggcgtactggcaaaagcgccattcatgcgttctcttcttttaataagaagtataagtttatcggttatctgaccagtatcataccgttcatcatcttcccttattactgtgtgattgggggatgggtaacaaaatacttatttgtatcagtaagcggaaatataaaccaggcagcaggagataccttttttgaaggctttatcagccagtctgtaagccctatggtatggctcctgattttcgctggcattacactgattgttgttgccctgggagtagaaggcggtatcgaaaaagtcagcaccatcctgatgccgattttgatcgtactgctgatcggtatttctgtttattgtattaccagaaagggagccatggaaggcgtattgtattacatcaagccaaatcttaaggatttgacgccgactacattcctggccgcattaggacagctgttttattccatgtcattggcaatggggatcatgattactttcggttcctatatgccgaaaaaatccaaccttgagaagtctgtttctcaggtagagatttttgatacaggtgtcgctttcctgtctgggcttatgattgtccctgcagtctttgtattttcaggaggaaatgccgatatgctcgcatccggcccatccctgatgtttaagatgctgccgaaggtatttaacagcatggcactgggaactgtcatcggagccgttttcttcattttagttttctttgcggcgctgacctctgcgatttcccttttggaaaccctggtctccatcgtaatggataagtttcatttatcccggttaagagcctgcatcaccatgtttgtcattgcaatgatcatggcagtgccgtcatcactgggatttggtatatggagcaatatcaagcttcttggcttcagcttcctggatttcttcgacttcatgagcaacagcgtgttaatgccgatcgcagccttctgcacctgcatgtttgccgcttatgtcattaaaccgaaagagatcattgacgaagtagaaagttcaggagattttaaacggaagaacttatatcttcctatgattaaattcttcgcaccgatctgtatcatcgcgattctgttattctctgtacttcagggaatgggaattattacggtataaaggtaaaaaaatggttctgaggtttagaccttagaaccatttttttatatttatttttctaagcagtccttcatggttctgccctctccgcacagtccttcaaaatcctttgtaaaagcatccactgcggctttcacagaatcatttttaatcagtccttctatgacatccggcgcaatggttgcggctccgatcccataagcacaaagctccagaacctgctgggaattcttaaagctggccgccagtacttctgtcttcaacccgtttttctgaaaaatgtcgtgaattcttttaactgaactcactccgtcggcacccagattgtcgatccggttcacatatggagccgcgtaggatgccccagcttttgccgccagaaaagcctgcatcggtgtatagattgctgtagctgtaatacccaccccttgtttggacagctgtttcatggctttcagaccttctgcagtagtaggtactttaataaatgtattctgtccaagccgttccaggatggtccccgcttcttccaccatatcttccgcccttttggacactacctgtacatgcagatccgctttttctccgataaagtcccggatctctttcagaacttcatatggctgccttttgcttttcgccaggatagacggatttgttgtcacaccatccacaggaaaatactcatataaatgtttaattgctttaatatttgcatcgtcaataataaatttcacttctttttctccttttctcactctatagttccatgatcacattttggactccgccatgtctggcccactgtccaaattcctgcatctgttctccggtatacattttaggattttctttgaaacaaaacgttttgccgatcaaatgatacttcgcctcagccagaggattataatttaagatctcataggccgcagacgggtagattccgctaatatatccggcgatttcctttatattgtctctgcaggccgtaagttccgggatcatgggcgtgcgcacagtaacctggtcttttttgtctgattccagaaggaacttcaagttttttttgatctgttcattggataccccaacgtactttttatgcatttcctcatctgcgatcttaaagtccgcaaagatactgtccaaatagggcagaagatattccagcacgtcctgttgtgcatacagggacgtctcaatggccgtatggattccttccactttacactgcttcaaaatctccagcgcaaactcccactgtaaaaggggctcccctcctgacagtgtcaccccgcctccatgatgataaaataccagatctctccgaatctctttcatcacatcctcagcgctgcacactctggagtccatttgcagagcgcccgaaggacacaggtctatgagacgttcccagtcctcaggggcatttgtatccaacaccacattccctgaaaccatcctggctcccgaagccagggctcgggccgcacaggttttgcagtggatacagcggttctcaaaccagaccggccttctttcccatgcaatgccctcaggattctggcaccacacacaggacagcgggcagccttttaagaatacagtggtgcgtatgccatccccgtcatgggtggaaaatctccggatatcaaatactctcccttccatatcagatgtctccatagcttgtgcgggcgatgatctcattttgcagttcatcagctaattccgtaaaatatgccgtatagcctgccaccctcacagtcagtccccggtactgttccgggttttccttggcggcaatgaggtcctcctttctcaccacgttaaactggatatgcggtatctccagatccacaaaacttctcaggaaacttccgaactttttaaccccggtctcattgtgaaaaaattcagggaggaacttcatgttcagcagaccgccgttagtggtcagggtcttatccagctttgagacagatttcaggactgccgtaggtcccttgatgtctcttccgtagactggtgacataccgccgtccgcaagaggttcccctgcgtggcggccgtccggtgtggcccccacattttctcccataggaacgtgtgctgacactgtatacatccctgtgtggtatgggcctccccgatagttggtaaaggtcctcagacggtttttgaaataatctgcccatttggtacccatagcatccacccagtccacgtcgtttccatactttggaaccttatttaacatcatagtgcgcaggatctcataaccctcaaaatccttctttaacgcgtccagcatttcttcccgtgaaacccttttctcatcgtaaaccaattgctttattgctgccagactgtctgcaaggtttgccacctggatcatctggatcccggacaaattgtacttggcccctcctgcggtcacatccattcctttttccatacagtcgtcaatggacgctgacaagaacggggatggcagcaggtcaatgtgggccttttccacttcctcgcaggccaggatcatcttatccatgaagtagtcgatctgcttttgaaatgcctgctccagctgtccaaaagtctcatagcttttaagacttccgaaatcaggagcaattctctctcccgtcaaaagacagactcctccggtcagtgtgacctccagcgccttattcaggttgaacatagctgagtcactccagcccagattatttccctgggtagtcagttccacacagcctacgatggcatagtccatggcatccttttcttcgatccccagttccatgatagatgggatcaccgccttgtcgttgaaaaactgcggcataccgcttccttttgcaacgacccgaactgcctcatgaagcagttcatccctggtgccctcgtgaagtctcactgagaggttgggctgtggcagtcctaggtgcctctgtgcctcaagaaataaaaatgaaagatcattagagtaatcgtttccttcctcatcctgtccgcctacagcaatattaaatccgataggaaagcctgcgaagtatttcgcaccgtgggagtttctcatatacacaatctcattgaacttcagccacatacattcgatgatctccagggcagcctgcctgtcaagccttccttcctttacatctttttcatagtactgaatcaggtggcggtccagacgtcccggggaaaaggaggatgcattggattccatttgaagaaccacaaataaaaaccagatggactggactgcctcatgaaaagtctctgccgggcgtttgctaagctccttacaatttgctgccacctggatcatggacttctttttttcctcgttctgctccttctctgccatggacatgatcaagtcatgataccggaccataaagttttgaacaccttccatcacaaggatcacgctctcatagaaatccctttgcccttcactgcatgttttaagcttttccctggcctgttctttaagtcctgccggtcccagattgagccattctatacagttgggacagatatgcccctgtgcatgatccttctggttgatctttaccacctttgcgatctcgtcgatttctttcccgtatcgtctgttcagcacatcctccagggatttcccttcccagtacggtttaatcacgttcctgaaagtttcgatatcctcagaatgaacgttgaatttatcctggggtcttgtgggcagagtttcaaactcccggtccacccatgtgctgccgctctccggaaatacaacaccatagcgcaccccggctgtcctgtttcctacaataagctcctccggctctgcgctgatccctatgttctccaatgaggcctttaacgccaatgccctctgaatgattcttggtttctcctcattttgtttatagcactccgtgatgatcaatgcctgttcaatggacgcatatctgggttctgacaacattttatcttttaaatactttactctctcagtctgaaaaacttctttcatccgctgctcctttcttggatagtttatagattgctatgctttattgttttttattattatatattatttattattatttttcaagccttattccgttttatatgtaaaaaataaggattcacaagtacaggagaaagtcggatataaataaatgaataaacaagggagcccgcttgtggctcccttgtttagtacaatatgcctatttgaatagggctgtaattacccctctcgtgagtaattctctatctattgaagttcatctttgaatcatttctgagtatgacagcccctctgggatcatcatagttcttttaccattttctccagctttactataatcgcttccgccttttttacggcatcgctgacaccaactcttaccttcgggataccgtcaaaacgtccttcgtccttgataggcatatcttttgtaaggatgactgcgtccgcccccaaaagatcctccgccttgatctggttttcaatcccgatggaaccctgtgtttccactttgatctcgatcccatggtttttcgccgccttttccaatgcctccgctgacatataggtatgtgccaccccggatgggcatgctgttactgctaaaaatttcattctgtgtacctccttataactgtatcttctaagacttattcaaaggaaagatcaatctccagatcttctccgtctgtatctgctacattttctgtgatatcctttttcagaaggatcatcagtcctgccgttacccctacagccgcggccagggaaacaaggaatccgatgggattgcccaatacagggagcatgatcagcccggaccaggccacaggattggtaatattgaacagataccccacagctcctcccacagcggcgccgatcatcgtggacggaatcacgcgcagagggtcatttgccgcaaagggaatggctccttccgtaatgcctacacatcccatggcaatggcactctttgccgcttctctctcttcctgtgtaaattttttctttgccagaaacgccgccagtgcacatccaaggggcggcgctgtcatcgtgaccgccatcggccctgcgtatgtataaactccggcacttacagtggccacaccgaaggtatatgcaactttgttaaaaggtcccccaaaatcaaagcctgccagaagcccgcagacagcacccaggatcaccttgttgccgttgcccaaatgttccatcacctttgtcataccactcataatgccggcaatgggcgcccctaaaatatactgcataaatcccatcgttaccagagatcctacaatcggtatgatcatgataggcatgatagaactgagtgctttcggaaccttgatcttctttaaataataacatacaacgcctcccagcagccctgtgacaataccgcccagaaaaccggcccccacattgatagaaatcataccgcctacaaagcccgggcaaatacctgctctgtctgcaatggacgctgcaatatacgcggacagcaccggaaccatcaaattcagcgcagtagatccgaaggtccacagagttgccatccatgttccctccggaggaacacctccctgcccatatgccatgactgccacagccataaggattccccctgtcaccacaaatggaatcatatgggacacaccattcatcaggtgttttctcgtatctttgaaaatacctacaaactcattcatcttctctctccttttttataaaaccagttccaacacttctttttcatctgtcgctctttgaagtccctctctgaagtcatcatggatgatctttctggagatcttcgccaggatctccagatgcttctctccctgccccggatcgggcacagcgatctggaatacgatctgcactttctcgtcagcccactgtaccggttccagaagccttgcaaaggccagtgagggttccttcacatggacagattttgcatgaggtgtggcgatgagaaatccaatacttgtgggtgctccctcctctctttttaaaacatcagccacatatccctctttgtcttccagccttccctgcttatccataacgccggcgattttttctacaacttcctccttagagcccgcttccaagtccaataccaccagtccttcattcattagttccatctgttgattcccctttcgccctttctgccgcttcaagcatttccccgcagcactgttttactgttttgccttgtaagaataatcccgatgtcccaccggtcaaaatgtcggctcccgcttttaccactttcggtattgtctcctgattgatattgccgtccgcctgtatctttgtcttcagtccggcatcgtctagcagttccctcatcctacggatatgttttatggcgccttcctgcattttctgccctgaaaatcctgggtttaccgtaagctttaagatccacggcacctctgccgccagctgtacaaaatcccctcccggcggtgttgatgccttgtatgccagcactggcttacatcctgcctttctgatctgttcaaacaccttgaacggatcttccatggcctcatagtgcactgcaatataatcagctccggctctggcatataagtcaatgtagcactccggttcataagccgccagatgcgcttcgatcgggagatctgccgctttcctcatgtgctccagaagagtctcagataatataaagcacttattaaaccgtccgtctaccatatcaaaatgaaaaaatgagatatctgactgttctgcctctttcaccgcctctccaagacggcataggtccatacaggaaaccgatgcagacaccataatttgtttttcttctgcctgtctcatactaatcctttcttttattgtttatctttgtttaatattattctatatttatttatcccattattcaataggttctttcttctctttttgccgttggctttctgcaaaaagaggacaccttggccatacaaatgcattttttgcagtaatactaatgtaaatctaaaactaggacaaagcggacaggcccacatcatatccctattcatgaagggctcgacaactttgtgcacatcatgcccggagggcttttttgttccatagggaaaactttcctatggaataaaaaaagctgcggtacgtctgccgcagcttttttctcagtgttaaatatcaggctccttcaatctgagttcatcataatcacatttttaatctcttctttattttttgccttccgtataaggtttgcagagtttttttccatagtcatctcataaaatgacgcaaaaaatgctctagttgactgaatgtcttcaaaattcagcgccagcaaaaagatcacatccacactgccctcttcccactccactttctgatccgtctttatgataacaaccgcaggctttttcacaagatttgccattccatggggaacagccactcctcctccgagaacagaggcactgatggattcccgcctaagcacgtcttcaaagaatccttcctccacatatcctccggccttcagcatatcacaggcttttttcagcagatctttttttgtcattggatctgattcaatcagaatcaggtcatcctgcatcagatttttaatggtccactgctttttcagattgtttttttcagccttcatctcattgcattgccttttgatccggtatacatcctgctctcccaccaccggagtcgtatagacaacatggggatgcttcactttcagagatggaactgtcgtgaccactagatcatactggctctcatcgatcataaccccagcattggccggcagcacagaaatcacattgatgtcccggatcttattctcaatctttctggcaatgatctgggcaattcccacaccgccgcttccgatgatgacagtattgacatccctctttttgggcaccatcgctccaccgaagaggatggccatataggagatctcatcttctgacggcaaagcccccaccagattctcgtattccttactggcagtaaaacaggctgaaaaaatggcggaataggtctgtttgatctcatccaaaaagggatttttgatctcaaaaccaaacttgactcttacaaaggagctgttcaagaacaaagccacactcgtcctgagcagcggatcttctataaagttccttcccacaatggaggaaatatactggatcatgttctgggctacatcctcaatacagatttctttttctatgaaaaacttcttattgacgatcctgctgctgttctgtacctctgccccaagaagcaggatatacaggtaaagcccctctcttggatctatattcatctggaactgcctgtttaagatccctgtaaaaatatccgtccagtcagcaatctcctccaccagtgtcagcctgttgaccatggattcctccaaaaaatgcttccctttcaaccgattcatctggttactgacatactctgtgatcatacagaatgtataatcattaaattggtaaccgatctgtctctccagctgttggatactgtagaccactttatccacactattttttctgtactgagtcatcagccttgcataagatcccggatctatcctgtaatccggggcagtctcctccctgcgctctgttgtatcaaggaccttctggttgttgcacaccagtacctttctcaagtcaaattcttttcccctgatctcgatcccttttcccacgatctggcggatcaacactttgtctggctctaaagccttgtttgccttttcaatatctgtccggatcgtagccttggatacaaacagttcctctgcaaacagtgccgccgtatacggctcgccgctttgaatcaatgtccgcacgatgtagctgatgcggtatttcctagtctcacaggacacccgttccttcggaaatgcctcctgcagttccttcatgtgaagaccagcattcagacatacgccctttcccctctgccggatcagctgatagcctttttcttcgcagaatgcggctatttccttcatataattatgtacactgcgctgggagatttccaacaatcctgcaattttctcatatgtgataaactcgtcatcctgatggatcagcactttcataatttcagatgcagtcttggaaagcataaaaactccttttattgttttttattatatattcttatttattattattttatacttttttatactttctgtcaacttcgtacatttgaagtaaactcagggctggaataaagcggacaagtccgcttcaactccctaaatccctcgatcataaaggtcttgttccactttgcgcgccaaatgcgatttgacgcagtcaaatagtttcctcacgcatttgtgtgtataatgcccgcagggcttttttgttccatagggaggttcgcagaactttcctatggaataaaaaaaggccataaaatcttatcgattctacgacctttcggtttcttattctgtaggttccagattctttaatgagatgtccaaaatcggcgcggagtgtgtcagtgcaccgcaggatacaaaatcgaccccgatctcctttatcttctttaaccggtcctttgtcacgtttccggaacattccgtaagggcacgacctcctatgatctccactgcctctttcatcatatcatcagacatattatccagcatgataatatctgcaccggcttccaaagcatcgttaaccatggcaagatcttctgtctccacttcgatctttctgacaaacggagcgtatgcccttgccatataaacagcttcccgcacgccacctgccgcgccgatatgattatcctttaacataaccccgtcagacaggttataccggtgatttttccctccgcctacggtgaccgcatacttttcaaacggcctcatatttggagtggtctttctcgtgtccaaaagctgtgtagaagatccctccagttcctttacaagagaattagtgaaagtagcgatcccgctcatccgctgaaggtaattcagcgctgtcctctctcctgacagaaggacacggatatctccccggagagttcccatgagctggccatttttgatctcatccccatctgaaagttccgtctcaaacgctaccttctcgtcgagaagggtgaacacacggtgaaacacctcaagtcctgccacgatcccgtcttccttgcagatcagatctacttttccttgtttcggctccggcatcacggagtttgtgctgacatcctcccctgtgatgtcttccttcaacgcattcagcagatactcgtcaatgtttaccgccattgttacaccatttatcatagaaatccccatcctttcttttaatctcctccagcacaagacgcttattctcttcctgtataccggacacatcctgatacattcctaaatccacctggcattctacaggcttctttggttcttttgtgatatcttcagcggattccagcgcaaagacaagagattccagcagagaattgctcgcaagacggttcctgccgtgaacgccgttacagctggcctctcctactgcatacaaatcttccatagaagtacggcttcttaaatccaccttgatccctcccatgaaataatgctgggccggcgtgaccgggatgcattctcttgtcatatcatagccttcctccagacattgcttataaatattagggaacctctgcttgatccgctccccgtcaaggtgggtaacggataaatacacatagtccgtgccgtccttttccatctgctcacggatggcagcagtcacaatatcccgtggaagcagctcatctatgaaacgctccccggctttgttgtagagataggccccctcccctctgacggactctgagatcagaaagcttctcccaggcttgtccgaataaaaggtcgtgggatgaatctgtatgtagttgatattttgtatctccacattgtgcctcagacagatggccagaccgtcagctgtcaaatgtctgtaattggtggaatgcttgaacagtccgcccatgcctccggtggcaagtacggtttttcccgcaaaaatacagtccacatccccctccggggtcacatagacaacgccacggcatgcattttctgactcgatcaggtcaatcatcgtgcagtgggtcaggatctcaatgttgtcccggcgtttgacctcctcataaagcttgcttgtgatctcttttccggtcacatcgtcatgatggagtatgcggaaaatcgaatggcctccctctctggtatactcaatctccccgtctctttcgtcaaaatcaacgccgaatgccgtcagatcgtcaatgatctccctggagcggacaatcatcttgtccacagccgctttatcattttcataatgcccggccttcatggtatcttcgaaatattggtcatagtcctcttcatccctcaaagctgagataccgccctgggccagaaaggaatcactttcctccacttctgctttggtcatcataataactctgtaatctttaggaagaaacagggcatgaaacaatccggctgccccggttccaactataattacatctgctgatctcataattaaaattaatcctttcccctgaacgaaaaagctgctttctctttattgagcgatgcgcagcatttcatccaacgctttctttgcgtcaagtcgcaatgtcccatccaattccacctgatttttcatatctctcaatgtatctctgacattctcaagcgtgattcgtttcatattcgggcagaactgtctgtgtccaacggaataaaatgtcttgttcggattcttttgttttaactcatataagacacccatctccgtacagataataaatttatctgcgtcagatgctgtggcataatcgataataccggatgtgctccccacataatccgccagttccacaacatccatagtacattccgggtgcaccaggatctctgcgtccggatgtgcttccttggctcttttgacattgtccgctgtaatgcttgtatgtacatggcagaagccgtcgttgtaaataaaattcttttccggaagcttggatccgatatatctgcccaggttttcgtccgggataaagaaaatattcttctgtggcagtgagctgacgatcttcatagcgttggaagatgtcacacagacatcagagtaagacttaatctccgctgtggaattgatataacagacaactgccaagtcatcgtactcatcccgcactttctggatcttgtccaagtctaccatatgagccatagggcagtccgccagctggtccggcatgatcactgttcggtctgggttcaggatcttagcactttcacccatgaaactgacaccggcaaaacaaatcacatcctttgactcctttaaagccacctttgccaaatagtaggaatctcccacgtagtccgcaatcgcctgcacctcatcatctacataataatgggccaataagaccgcatttctttctctttttaactcttcaatctcttttgcgaggttgtccatccttttcctccttagcaagggaattttcccaactgatataattccatactaagatttaatataccactttgactaattgttatcaagtatttggcggggttttctggcataaatgcttaacttatgccaaaaaagtacttaaaacagcacccttatcaacggtgccgtttccgttgataaagatgctgtctgcttaaaggttatgaatgcagaactctttcagctcctctgccgccttttcctcatcctccccgtcgatgacgaatgtgaccgattccttttggtgtgcccgcaatgtcagaagagaaataatatttttggcattggctttcagaactcccttttgtactatgatcctgctattataggtctttgccttttccaccagaagcacagccggccgtgcatggatccccaccggtgactgcacctcaaaatcaaactgcttcatgatgatctcctcctgatgatttaagggcgggtgcctctttgagcctttggatctcctgtgtaatccgctttgcaaatgaaaaggactgcttcatcgcgaaactttttattctgacagggtttgatatcaggggaatctctctttgcctgccgccctgcaggctgatcgtaaccttcatatagtccaccgttcccgcatctttctttttgatcttttcgtctaattcatccagaggtattgcaggccctgcctcaatcctgcattcgctgatatcatcgagcgaataaaactccggttccttaatttgtttttggttcatgcggttgttcagaagacagatttttccgttcttttcatcaaataaaatataatttccgattctccctgtgatttcaaaatcttccgttagttctctcttactttcacacagcttgctgatctcgtcaaaacttttgttagtgatcgtttctgtaaaatgattgctcgctttctcataacagactttacagataaatccgtccgaataacggaactttttgaacatccccagggatgcatggcagatatcacatgtcttcattttcaaaccaccctttctaatcgctgaatacttcggtcaatgccttatagagtttcgtatatttctgatactttttctcatagagacctgcattgtattctctcggataaaaacttttcttcgtctccactgtgttgccgatcagctgttccaggtcttcatcagtcctgtcactggcagctgccatgagagccacaccgtatcccgctcccgcactattcttgagctgctccactttcgtgttcaggacatccgcaaggatttgcatccaaacgctgtttttagaccctcctccggtgaccttaagattcccaagggcagtcctgtcaatattcatgacctcagcaagctgtctcacgccgagacaaattccttccatgaccgctgcagtcatctcctgcctggtagtctccgtcccaataccgaccatagctccccttaaagcagggtccgcataaatggtcttgtcacccacaaggtgaggataaaagatcagatcattctcaccgagtttttcaagatccatcccgctggtctccgctgaaaaatcttttgttcccaggatctgtctcacccaccatccatagctacttcctgatgactgtatcactccctggacaagcgtcagaatcttctttccgtccacagaaaacatgatattctttccttttgcctcaaaatccatctgttctttcgggaacataaggacaccggatgtgcccagtgacagaaccggatacaggtaagaaaagcatcccgtagatatggccgctgccggattgtctccggttccgacgatcactctcacctgctgccggaacccaaacttctttctccacgaatccgtcacatatccagctgtctctttgcttcccttcacttttggatagattgcttctggaaatcccaggatctccctgatctctggggaccattttcctgccttcagatcaaaaagagaagatgtagatgcctcgcagtaatccgtctgacattgtccggtcagacggtaaacaatatagtccgggccaatcagaaacgtctttatctgctgaaagtgttccggttcattttgctttaaccacagcaggttcactgccgggctcccagtggaaatgatattggagatataggaaacttccgggaccttacgaatcttttcttttagttcctttaccagatcgattgtcctcgtatcattccacatcagtgccggacggatggatcttccgtcccctccgacaaatactgccgtgtgcatctggcctgtcactccaatggctttgatactttccggatcttctctcagaagaagttctttcatagcatcctctgccgcgttcatccagatttccggattgatctctttccatccgggtttaggctcatcgatcccatattccctgctgctttcttttctgatcttccctgcttcatcaatcagcgtcagttttgcagaagaagttcctatatcaattccaatatactgttccatttgctattctccaaatctcagaatcactttatatgtgtccggcttcatagcagccgcgatggctttatcaaaatcccggtaatcataaatctgttccgtgagcacggtaggatcaatcagcccttttccaatcagctgtactgcctgatgaaaggatgtgatcgtgggactgacagctcccgtcacagtcttctggtaagaatgtacggctcccatatccaccggcaccggatcattgggatgcatggagctgaacatgacactcattccgccgggagccgtcatctccacagcctgagccgcaatggctgggattgctgtggtattgaatacaacctgggcccctcttcctccggtaagctcttttaccttctccacggcatcttcatttaccggatccactacatcgtcacagccaagcgttaaagcccgttctcttcgttccttcagaggttcactcagaataactctagctccttttaattttgccatcatcacatggagcatccccatggtaccaccaccgatgacagccacatcatccccaaactgaatctctgtccggttaatgctgttgactacacatgccaaaggttcggtgaatgccattttttcaaagtctgtgctgtctgggtatacaaacaggtcttccgccttagctacgacaaattctgcaaatccgccgtaacctgacaacccgtccgggttcgtaaagattttgctttttgggtgttcctcacagatattttcttccccatgtttacagaagaaacattccttgcagtcgtcaatgatgtactggaccaccttctgccctttagaaaatcgcctgccgcttactccgctgcccatttcttcgatcactccgcagtactcatgtccgccgatccttggatagctgtaattacagtctccgttaaagtccctcacatcgttcgtgcagataccagaatctttgatcctgatcagcacctcatcttcttttaattctggtaattcgatctccttaatagagaaatctttcggctgatttaatataattgctttcatctacctcacactttctattcctgtctgcctttaatatgccaggattcctgtgacaccgcctacaacaccgattacaacgatcagaccgatgatctttaaagaggaccatctcctcttattcatcagataataaacgagcatagttactgccagcggaaggatacttggacagatggcgtctaaaaaactggtctgaatatcatatgtggatgtggagcttaccaccttaagcccgcagcttgcttttacataatttacaaccagtccgcccattaccatgcagcccatgatggacgcgcctttgatcagcttattgagtattcctttttccaggaaatccatgattgcttcacttccggctttataaccaaacataaagttccagtagcttaagccatatgctgcggcaatgatgacaaccgcatagatcacagctccccatatatttccgcttccagagcgggttaagtcaatacatactgccaaaaggatcgggatcaccacgccctgccagatggtatcacccatacctgccagaggccccatcagggaggtctttaagtttgtgataaactcatcgggtatctgttcgcccatagccttttgttcttccagggcaactgccataccaaggatacatgccccgaattcgatatggacattaaaaaattcaatctcccgcttcatgacttcttttcgtttggaagggttatctttatataagaaattgataatggctgagaacatatgggcaacaacctggcccatcattctttcatagttatagcatgtctgcgggaatgtctcccaaataaaccaggctttgatcaaggcggcctttgggatcaaacttttctttttattttccatcttagtcgtcctcctcatcgtcttcatcatctactactgctgctcttgccggctccattgcggaggtgacctgaacatagacaactgctacaagcagcgcaatgatacctaaggtcagcagcggaagcttggaatatacagccagcaaaaatcctacaaataagaataccttggattcccccttgaaaatatactgcagggtgatagcgattcccagtgcaggcatcagtccgccgatgatctggaagacagtcaacacttttccgctgagcatgtttaaaataccctgaatatagttagatccgaaataagctgccagggcacacgggattgccgtcattataaaacacatgatctgcggaaacagaacattggcccgccatattttgttatactgctctttctcgatgtatttatctgcgatatgtacaaagaagcagtcaaaggtcatacgccctgcccagacgatagttccaagaataccgataggcactgccagcgccagcgccgtgtccgtatccagtccgcccacgatggcataagctgttcccaatactcctgccagacccatatccgccggcatacttcctcctgcagacataaagcccagatacaccaagttgatggttgccccgatcacggcaccctgtaccggatgtcccaggatcaaaccagtgatcataccgcataccagcggtctctgtaaggaccaaaggcctacaaacggtaagttgccgactgccagccagtatacaacaccgcacagaactgcctgtataatggtcatcttttccatatatatttcctccttctatttatccaagtatcctgttacttcaatcacctgctgttccgggaccagctgatagtagacgtggacattttttgccataagatttttgatggaaatgatctcatcaggatcacaggccacatttttaataaatggcgttctctccccgcgaaggcccatgcctcctaggttcacatccttaagttccaatccaagatctgtcatccggtcatatgtgatcggcgtcttggtaagaatcatgactctttctcctgattccttcggatcttttttcagaacctccgctcctttttctgtaccatatacatttaccttgacgccgtttggagcgagtgctttgatgacccgtttgttgaacttatctgcggcaacttcatcgtctacgacgatgatcctgttgacatttaagctgggtgtccacacagagacaacttccccgtggatcagccggtcatccactctggctaatacgacatttttcattcttcctctacctcctcaaataatttcctaacatctttaactgtccctggtgccgcttcaataagcccagcacagatctcctctgcattttttcctgcataccgccccatcatcacttctaccattaaaggcaggttaatccctgtcacgtgatacacatcatgatgttccattaaagaaacaattgcattaaacgggcttccgtggaacagatcagaaacaaaaaggatctcttccccctcttccgtcttttcgatctctgcctccagtttttccgttaaggtggctaccgtctgctccggaaacaatccataagctaccaggttttcttgttcaccgacaagcatctgggtactttccacgagcccttttgagtagcttccgtgggatactgcaatgaccttcatcttcttacctccttttcatctggcctttgatgtaattgaagtataccacggtatatcctgtgattttcacagacatttgcatgaacattaccgcaggatctgccaacattttgcatgattgattgcgcaatttattacgcagttttcactttatttttgcactggctttgcgggatggtttgtgcaataaacaaaatcattctgggctttttcattgttataatcaaatcaagcttagtacgtacaggtgaacggtaaaaacgacgaattccagattagataggaggaagcggcctttttatcaccgccgctatatgaaaatgaaaattgtaaatggatttgacctgatgaattttgcacaagataaccactatattctgcctgcattcaacacgaccaacctggagatgacttatgccattgccaaaggattaaatcaggcaggacttcctggatatattcagatttcttccaataacctgaggctgtcaagccccgataccatcacttatctgacgagtgatgcactgaaagacagcgatgtgcccatcggtctgcatttagaccacggcaagtcttatgaacatgtaaaggcatgtgtggatgcaggttttacatctattatgatcgatgcttctcatctgcctttcgaggaaaatatcaaggaggtaaaacgtgccgtgcagtactgtcatttctatggtgttcctgtagaggcagagcttggcgcgctgaaaggaaaggaagaggatatcgtaaatgaagcggactgcaaaaccgatcctggaatggtagcagactttgtggaaagaaccggatgtgacctgttggcagtttccgttggaaatgtacatggactggatctaactccaaaagtagatcttccactgttagatgaaatctcaaaggtttcccctgtgccccttgtcatgcacggaggttccggaatcccatttgagactatccagaaagcgagagagtttcatctgttaaaagtaaattatggatcagatctgagaaaggcttttatttctacctttggtgaggcttatgaacagaaccataatgaggtgaatgtaatcgggctgagtcttgagtccatagaaaaagtgagcaaaaaggcagcggagctggtatccattattaatgcatgacataagtttttctgcattgtctccagtcgactctggaaaggcctccttccgacaatgcagaaaaactatcgtaggcggtaccttttgtcttgcatcaagattctccagcagacattacgtctatttttaccagttcggaggctttgcactcctaagacagcacgctgtagaactggtgaaaatttcactctgttgtcagttatttgtgttcatatcaagaaaaaacatctattcggctgaatagatgttttttcttgccactatagttacattgggtttgcttttttgtttcctgtctttgccttgccctgaatctctggtacaggaggtacgtcatttttaggaatgtgtgtcttatgattgctctgtgtaccatgtggttctttgggatctggccgtctcattccagcctttgccattggattggttacctccagttcttttgcttttaaaaagatcttattacaaaatcagtatttctctttgaaggttttttatccatcatttatattgattcacctatccttagataaaaaaaatcactttctgtgtatggatgatcaaaggtcaccggcagctcctgttcttccattaagcggaacccagctgcctcataaaacttgtgtgctctgtgggtattttttggtgtatccagcagcagcatttttatgtgatgttctctggcgaaatcaagaagtctgctgtatagtctccgtccaagatgatgaggggcgcttctgtatgcttcatcggtaaaaaactttttcataacagcgatcccattgccgcagttcattagtccaatacaacccacgacccggctgttttcttttgccacccagaagttccctacggtattgatatacttgtctttaatatgaagtaattccggctggtcctcaaccgatacaaatggccgggttccgtcattttggcagctcagcaccagatcgatcacttcttccctgtcttcttcggtatatatcttaatttctatcacaggctctcctccttttcctatccttgacagcttctttgtatatctatataataaccgaaaagataaattcagtataattgaacttcctgaattataagttcatttattttaaactatatctgcggacaaagggaggatacaagatggatataaaatatatgaaaacctttaagacgatcctggaaacgggcagctttcaaaaagcagcagaacgtctgaattacgctcaatccacagttactctgcagattcagtcattagagcaggaattatccgtaaagctgtttgataagatcgggcgtaaaatgcagctgacacaggcaggccaggatctggtcccatacattgatgctgtactggatgcggcccaggagttagataattacggaaaaagcaaagaccagctatccggaacgctccgtgtcgccgtgcctgaaacgctgctgacatataagcttcagccagtcttaagagaattcagggaacaggctccggatgtcaggctttcccttgatatcccgaattgttatgtgattcaggaacaggttaagaatggaagtgttgatctgggcatccattatgacatcggaggatacggtgcccagacagctgtgaaacccttggccgcctaccccctggctctgatcgccagcccggatttaagaaaagaagatctggattttatccagcagggacagagaaaggatatctgtctgctgaccgtggacaaacaaagcgtttatcataaaatctttcatgattatctgaacgaatctgatatcgtcttgaatggagagatggagatcggcagtgtggaggctgtgaaacggagtgccgccagcaatctgggcgtgacatatctgcccagatatgccgcagaagatgaacttcaacaggggatcttaaaagaacttcctaccagacttacaaatccaaccatcaccgcagtctgtgtgtatcacaaaaagaaatgggtcactccgacaatggagttgtttcttcagctgttaagggaatatctattaccttaaaaccgtattttccgaaaaatacaacaaagtaaaaaactataatatacattactaataacaagcatattaaatccaccgaattaaaacatttatccggtggatttttcaggtttctaaatatttcttttcttacaaaactaagtcttttatctgctgacaatcttatccgttggaacattatgtccaccagacaatactcttgatgcaacacgctcaacattaatactagaatcactcgttagtacatatatacatttaatataaattttatatctaattttcgattatccgcataaacactatactttcaagtattttgaagtatagaaaaaactcattttaccacgaatttaccacgattgaatgagccttgatatgacctataaaa

SEQ ID NO: 26 - DNA, 36544 bp, Anaerostipes rhamnosivorans
attttgatgtattatatatatagacaacaagtccgaaaaagtacactttttcggacttgttgtctatattagatgctaaaatcaaaaaatattatcttgtctcccgtgctttatcataaaaagttgatcgtggcatattacataaccttgctccttcatttatactgatttctttattggcccacatagaaactacctgatgaaagttatctggcaaagttctctccggccttccaaatcttactcctcgtgcttttgctgccgcaataccttctgcttgtcgttgctttatattttctcgttctgtctccgccacataagataaaatctgcaatacaatatccgctataaaagtccccattaggtttttctctcttcttgtatccagaagcggcatatctaatactacgatatctgcttttttaacttttgtgataatacgccattgttcaattatttcttcataatttctgcctaaacgatcaattgactttacaaacaaaatagtgttttcatttaatcttcgcagcaattttttgtattcctttcgatcaaaagtttttcccgagcacctatctatgtagattttattctttgaaattcctacattcgtcaatgctatcatttgtcttgcttcattttgatcctggctggataccctaacatatccatatttcttttgtcccttattcattccttacctccatagaatagttaaagctttactattctattttgaaagaattgttcatgaaatcctagtatttcaaagcctttgttttcatcaattttaaaagaaaagcaacttatgttcaaatgaacacaagttgctcaatcccagtatttatataaggttcagtttttttttatcttcttttttctaaatttcaggctcttcatccaatatatttctgttttgttctggtatcatttttgttaaggtcagtgtttccttgattcctctacattttgttctttctgggctgctccatgtacgttccatttccttctgcataaatatttgaaaaggcctgatttcctccgtcttatcaaatatagccaacgccatatagtaagcctccttatcatcttcgtagataatggtcggagggcagtcatgtatcatcaagtaatagttcattatcgttcgtccaactcttccattcccatctgcaaaaggatgaatactctcaaaatttaagtggagatatgctgccgctgtcaatggattaattccatcttcctgaatttcttcacaaatgaaatgaatttcctcttctacatcttctgctggaacaccgatattgtctcctactacatagtcatgctgtttaaactttcctggacgttctcccctatgataacgccgttcatcatagcatcctctcataaggatattatgaatttctttgataagatttaccgtcaatggctgcttttttacaattttctctttcagaaattcatagcacgtcttttgattttctatttcaaaaatcgttctgacatctccggtatagttaattactttcccattctcaaagatttcccttgtattatgataagtgatattttcattctctattttcccactatgataagcaaatagaattttaaaattgtctaattggcagtccaaatcttctaaggatccaatcggcttccattccttcattattgtttgatatgtctttttcattttatcagctcctgtagccattatatcataaaaacagttaaatcatttttttaatgacctaaccgctcatctaaaaggacattgtatcaataaaattccatgttttaaaacttctgttcatatgaacacaagtccccaaaaccacgtatttatcagtcttttcaaggttataagcattcttttattcttcatttgtcatacccatatcctttgttttcactttcgtggaatcaaatttttgactccacaaaagctattatctacacaactcatctaaagaaatctccaaagcttccgcaatcttttttattgtagacacccgtccatcatctcttttctccaaatcttcaatcgtcctgactggaataccagataattttgacaatgctggccttgacaactttctttcttctcttatctctctaagcttcaactgaaaacaactccttttccagagcttctacatcttcgacaatttcacattcccgaatagtatccggacaaatatctatacaatcttccggatcaagcttgcctgataaatcccaagccaatgtatcattcatgatcgtacaacgctccataaaaaaacttttatcctgcagctttttaaaaatcccacctttttgaatcaacggagcagcatcatagagccgaaccgtattgtcgtccatgtagacataaaccttataatccagtgttggaataacctgttctatttccggtaaatatcccataaattctcctttccaaacctctatctaagaggctcgattttctttaaatttccttgcgcattctcaatcttatcccaattctgcattaactcctcttgatgaatcaacgcccaggctgtcacaagttttaattgttttgatggcagtgctcccacaataatccggcaagttctaatatcaatttctgctttcttcccattataatctgcatggaaatgtggtggtctatgttcatcatagtacattgtaattcggattccgaaaaaatttgatatttctggcatgtcattctcccttctatattttatattataccacgtaaatacgtggttgtcaattcattctaaacatattgagtttcaaaaatcgacacttatttgtgcaatgatgtttttttcaataacccccacctatgagctttaagcttttgctcatgaatgctattcttctgtcttttagcaagcttcctattcgtaatacgaatagcttgttggggtgcccccaatcccctttttaatcttgggaagtttcccaatccctctttagaatcataaaaacattatattgaatacatcttaaattcctgagcaatcaactttgattcatatgaacagaagtcaggaaacccttgattttatgcggattcgcagacattttaactttcttttttatcctgaatcacattcttcccaatacaaagtatcccctacactttcctttctacacctttctttttctccattttcttttataattatcatattcagataagatttgagcataaaaaaagggcttccgtaacttcggttcatatgaacagaagttacggaagcattgttttttactcaatgaaaagtctttctattggtatatgattgatcttcaactttgtatgtgagaaacgattttctttaaatttatcattcgtcatcgttacctttgcggtcagtctatgttcgtctagctttacggtagcatccaaactggcagcatctttttgaattgatacattttcatcctctgaggaaacatcagtcagttgatatcgaatgaccggttcctcagtaatgatataatgatctcccggcacaatctgatcaatgattgttgacaatgtaatatatccacttttatctgacgttgctttttctatttcatcttttgtaaatgtaatagaggcgtggtagcttctccattgatctttccagtccttccccttgatgttaaataagaaggttggatctccatgactcaaatcaatggaactctttttaattcttttttctaaatgaagttttacatcaaatggctgtaccgaaacatccctttttgcctgatctccaccagacggaattttcggatcctctttcactccgtttgttgacggaacgctaacctgattctttaagtcttcacctcttggatctgccagttttacttttgcctgatatgtcactgtcaactgatcagcaaaatctatctggtatccttccttgctgacgcaggggattgtatcttttttgactgcatatggtgtttggatatgaaacatattatcataaagttgaatgttacatttctttgtaatgtcggtatccccggctaatatttttatggtttcttttttcagttcaagtccatcagcatccatctcatctgaaagctccaccgctctcataaatgtcccaggatttttattctgaatccggattgtataggtcagcgtctctccaatttcaggtctttcatttgatacttgcttttgaacccctaactttggactgttgacataagtttctttgctggcttttgtctcaggaacaaaaaaacctttctctgagacctcatttaagaccatctttccgttaagttctttttgtggagttgcggtatatgtaatcgtaatcgtatgattggctggctgcgtataagttcccaatgctgttagaacccactttctttgatttttagacattgtataattagagccgctgatccccgatacctgcaaggattccaaatctaactccattccttccggcaaagtatcctgcagaactatatttgacatctctgcgtcagtagaaatatttttcgctgtcactgtataatgaatcttttcccccacctgctgttcaaatagggaggttgttttctttagctccactttgggtacatggatcctcgttgttacttgggccgtattagcatccactgttttctcaggagccgtaatcactgatttcccagtatcataaaagcgtaaataagatcccccagattcttgaacataatgtccatgatttcttaccgttgcttctgcaatccctgtatttagtttcactgtgattcttaaaatataattcttactataaaaatcttctgtctttacattttttgctgttgcagtcaccttattgttactttgggcaatcgtaaaatcacttgtaacgtcctggcctgaatacccttcgatgactttaatagcctgaatactgaggcaggaatcaacttggtcttccagtcggaaactttgatagaagttatggctgactttctcaagcggtatggcctgattgatattgtaggtccatgtttcatttcgtgacttaacgttattcaaacttacatttgtttcgtctgtatcggtgattgtcttttgcggagtcgccgttggcagggttgtatgtacacttttgtccccccagctgaatccttcatatacagatttttcatctacgactccaaagattttctggatagaacttcctgaaaatgtatagctaaacatgtgcttatttcctgcggcagtccctggtgaggaatttatgttctttgtttcatagaatgttttgtaacctcctgactcttcacaggctaaatcacatccatttttcccaatccagattttattgactttggaagattctacgcccaaaaattgatgagcatcaatatcttcttctgatactaccccttttacattaaccaaggtattcgttcctgctttcaagaactcatattttagcttgatctggtttaatccccggattagccagcccatattacaggtactgccccggctggagttttcaagtccagttgtatttggcgcatctgcctgaaaacatggattccatccagatcgtatttccttttgctttacccagccggtcaccgtaagccgaacatccagttttactgcgcttgctccatatccataaattcctatgtttttataacgcagcacaatcccatttgctgcatggttacttattaaaaaggcttttgtttttttgcttgtattcgtataatcgtttttcccatcctttttttgaagaaccggcacattggattgtgtccctttctcaatcactggtgctgaggaaagtttgttctttatacttagtgaatattccactccggctccggaagcagaactggcccggccgttgtcataatcatatttatttaggcctgaaatttctttcgtggttggcatgttatcttctgtgacatatccactgattgctgccactgatatccccatctgacttaacaccaccaaacacaaaatcatgatgattttcctttttttcatttctccctccgtaataatttcaaaatcccaatactgcataggctgatgaaaaggatctgccataggcagaatgctttatctccagtctgaacaatcttatttttagatacttgatgttttttagcagctgtacttttagatctttcatccaactctgcgccaaatccccatgtcacatgggatgtctggtctgccacttgattttttgctttggaatccatctgcagagtaaaaataagatttgccgtttctcctttttgatactttcctagagaaatcggttcctttaaatctgcatctaagtttccctcatagatgctttttgtttcatgttctttcactaaatcaatctttagttcgataaatttcaagatctcatcctccggatgttttgtataaaaatacagctctgctggttgactatttttattttctatcacagcggtgccggagcagaaatctcctggaatcatctcatcaaaaccctggaaaaaatcactgcttgttgtaactaatccccttgcagtttgatcgtatatgatctttggttcatctgcagccacctgaatacttccggctagaaggaagatcatgaagaaccatagtctctttttcaatttagtttctccttcacatttgcttcaatctctgcatttccccacggatcctttgatgtgaaatctggagtaaaatgtttgctttgaattgcctctacttgaacttccagctctacaccttgtcttacatactcatttgcccactggtctgggatcagaaaagattgaaaaagtgttgttgtttcattctcttttaagatggattggtaataataaagatccccaatctttttccattgatttgttttaagcccctgaatgtattctggcggacagacctgccttgtgccatctttatctgtgaaatagatttttgctcgaatatagcagttgatcccttgattttgaatttctggtattactgatatctcctctcctggaagaacatcattttgctcttttctttgtatgtttaaggatattttcacttttcctgtttttatgtgattctgtatctccgtttgatctgtaaaggatgctgcagatccagagataaacagcaatccaaatatgctaaaaaaaagcagccttttctttcccctcattcgccttcccctttctgcagataatctctccaggcttccttatagtctgcatatgttgtttgaatggattctgcatagacaatcagatcaaagtctttataggccgaccgtggagcatccgcagaaataacaacagacttaagcagttctggtgtcaccgttcctgcaggcaaaggatctgaaaaataataatagcctccaagtccctgcccctgttcctctggaatataactccatgcaccttctggtttactgagcgttacataaggactcataaaattattagaatacctgatgcttgctctgacaaaaacttttgccgttccattgttcttgatctgaacttttttttgaaacgttgtctcctccccagatttaatataatccggaagcttgaaatcctctaagatctctatctcattagatccaaccgtaatctcattcttcttttctgacaaggaaagaaaaacagctgaggtaccggtcacgaataggatagataccaatataaggagaaccgtccaatacttttttcttttcatacccagccccctattcttgatttttgacgcttggaaaagcttcctcaatttgttggttcaaatatgtttgatatgcagatatgaccttttttattgttgtattccctgtgcctgtatgaactgtttggatggccagagcctgtactggaataatgagtgattctttttctatttgattttcataaaaatctattgcagttacttctgtaaataatggtactgtttcatcatcatgtttcagctctttgtaataagcataaacatgcatctgatattcttttccatcgtttaattgaacttgttcttttgcatcttctatctctgtccatttcccattttgttgataggtaaacatctcttgtggtgtagcttgaactggagatgtttttgatctgacgttttcaatcggtataaaaacccgaagatatacatactcatcgtttcttcctgtattttttacgtagggatctttttgtattgtttgaattggtacgatatttttagcctgtttttcatcccaatgaggctcttctaggctgcatcggacttcaccaatcgtaaaagtattctgcttttgatcctgatccgttagataggctaaagttccggcagttcccgctaaaagacataaaatcataatgccgataccaagtttcttctttttacttactctcatctttcttttccctccttggaatgaactgaattaagatgattacaatccatattggaatactcctccatgttcttaaattctcaataaagtaccctagatatggaatagagcaaagataacgccctttgatgttcttcggataaacctggaagagatctgaatcttgatttttatctccttttgttatgactgcctttttctctattttttctatccgatgtgttaccgtctctgttcccatagaaaacgtaataatatcattctgtcttaattcttgaaatgccacattttcttttacaaatgccaaagagccagtgaatatcactggctccatggatcctgaataaacaacatatggatgaatatgaaatagcattggcaaaaatagaatacaaccaagacagataatacaaagatttaaaaaggagacgaattttgatattacttccattgcggcctctacatttccattcccggttcttcctttggtagttgatttaatccatccggctgatacaatttttgctgcagcgctgtttgtaacttatcgtagtcataatctctctgctcgaaattattgaatttgtttgcctcaatcttttcccctttctcctggccaactcctttgttctggttttttaatggatatagagccttccatccattgctaactgtttgattaaagatttctgcctgatttgaaaggtcctgatccataaaagcaacatgatcaattgtcggctgaatttgagatttcaacatcggaaatcctatttcctcccgatattggatataatttttaattgctttgtcgagctgtggatcctcatgatagttttcttctttcacaacctcttcgaccagcgatgtttctgcttcttttgaaggctcttcgactgtctgttcttctgatgtctcttctaccatatcttgtactttttctatcgtctgattgtctaaaattttatcttgaatttctggcttttctaggtcttcgcttacttgctgctcaacctcctccatggattctggctctctttgtgcttctgcttcaagaatcctttcttttatgacctcctgtgccctctcattcaaaacttccgttatcttaggactcattgtattttccacctctttggatggaaagtgaacatacaggttggtagctttcaagaaagactctaaaattcctttcaactgctcttttattttatcaaacactttttgggtagccagcgtgagacgcaaatctttcatttgatccgctgtcatagctggatgattaaattgctttgtatctaatcctaatttcattccaagccggatttgtttcatctgttccgcatcgtagttttgacttgtgtactctttcgtatcaagcccctgttccataccagtccggatctgaagcatctgctccgcatttaaagttggattcaaatattgatctacatcgactccattttccataccaacacggatctgtgccatctgttccgcactgaactttttatccgcatactttgaaacatcaagttttgattccatgcctaaacgaatctccctcatttgttccgcttttaaatttacgtcgttatatacttgggtgtccaactttctcctaagtcctaatttaatctctaataattgtcgattatcaaactgctttttctcatcgttttctgccattttgattcccccttacggttctatttcatcttctaaaatctcttgctccatttcctgatcaaaggattgaatcggttctaatattttttccttgaattgtgaatgctcccgttttggctcttctagttttgtaaagccctgatcatctacccgatatgcactatctgctaatacatcctctggttcaacaacatctgtctgattgatttctctgaccattcctgccaattcatggatattacccatactttcagccacttttgctggcaatacgatcacttcgtgaatggatgatggaaggacatagaaatcatctttcagacgttcccttatctgatctgtcattttgggataaaataaggcagctgcaccatttacctggcttttatttgtcaatacatacataaaatccggtaccggataaaatggaattgcctctgccattgagataaatttggctggaaataacttgggtgtattttccatagcccttgcatgtaattcttcttgtgtaatattaaaactctttaacatacgataatcaatttgtccacttaatgtcccagttatcgttttctctatttgtaatttatatgtaattgctaaatcttcttttaaacagtgaggtatcgtttttaataagtcttgattttgctttgttccaactatattaaaaaagatattttccggatgaaactttataagttccttttcaatgctaatatccggagagggtagcttaagactttccgaaatcttctttagaatatctttgaatggccagccattctgatatgcttcccatgaagcatccagataaacgattggagccaaattgctatccgggaatttaacactaattccttgtaatttaacttgattgtttttaataacttctactgtgtttacttctgttccaggattcgactgggaaaatgattctctcaattgttttatgattgattgttcaaaatctctatattccatttacttttttcctcccttctgttcttttgtaacctttgcaaccatctcagcatacacttgaagccgcttattctgtttctctttcctgctttcctgctttttttgtttcatattgttcccctttctttatataaattggtttaaggttctaattcgatatcattttcttgatgtagattatagtcatttgttaaggataaatcttgtagttccaactctgaatccattgcttcaagtttgcttggcctcaagactggacctgtaagcacttcatccattacaaatccatctcttacttttgctcgatggcatacgcaggcatttccgcaaatgtgagactgcccccttatgctggcccatcccgtcactctggcattttcttcaatccgagaagatcctgagatcaatgcgtttccggacactttcgcgtgtccagaaattcttgcatctccttttactactgctctcccttttacttttgaatcctcttcaacccaggcatttcttaatacacaagcagaatcataaacccatgcagagtgaaactgcgataagttattttcactggcaataaatccaccaagctgtccggcttttacatctgcaaaatctttaagggcctggatccgatagactatttctccttgaaccttttttgtttcttctgtcaacttatatttatattgcattgtctccctccttaaatctccatatcaaaatcttctatcatgctagaggtattttctaaatcaggggctttgcaaaaccctttcgcttcatccaatgctgaaaccagtccttttaccagtttttttatatcctgtgaatggtttttcgctgtatctgaggaaactctggcattaaattcttccggtgataaatcatactctgccgcttcatctacaacctcttctgggaaaatctttcctgactgataacagtatccacactgtttgattgctctgaacgtttcctctgtaatttttccggaaaccaacagatcagtgtccaccataaattccaaaagatcttcctggttaaattcttccggcagttttccctgaaacgtacgctgcaacatttgatcagatcccatcgcataccggcgtggtgctctctgttgaactggtggttcacctgttcctgatagttctttatccgggaacttttctttcgcccaattacggaagatcttttctacctgatccccatccaatttgggatatttgcttttccaatctttgatatgccgcataccagcttctggatcctcagccttcatacttcgtttcatggccatctttacagccgcaacttccattctgtttgtgagattcctaaacggctcattttcaatgtattcttgataattttccatcaaatatttgctaattttttctccggtctggcaggctcgaaaaagttcattgggatcctcctttaaaatttttatccaggattctagatagttggaatgatcccggagtccctcatcttctacctcaaaccccagatccgcctccaaaaatacagaagagatctctgcatttaattcttctctggcatattcctcggtcccaaataaattcatcagtggccgatttaaacgatctggatgtccggtgctatgtgccatctcatggagtgcaaccgacaaaaaggctgccggtgatttaaagaatgctcttggcggcaggacaatctggtcttcctctggagaataaaaagccatttcttgagccgcttctacaatgctgcatttagaagattgaaagatctcatctgtcaattttaaaatttcatcttctttcaagacctcctgttttgcaagcggttctaccccatcgacttgctccgcattaaacacacggaaataattgcaaataggatgatccaaccgctctgttttttttacttccctgccatgttcatctttttccttgacttctttggtaaaaatccatttctctaaaagagtacttttttctcctttccgtacctggtatccctgatttttagcttggatgaaggtcatccatcgtggatcctgataaccggcattgatcgcagccatggccaatcgtattctgttccctccaagatagtgaaaaccactgactggattatacggctgcaaagccttacgatcccattcctctggtgaaaagagatacccttttttcatgttttcaataattttctctaccagttccctccgggactgtttgactaattcaatcgcactggccatccttttccccctttctcaaatctataaaatcattgatgttttgtagctcttctccatgcaactcctcacctggtatctccattggatcctcttctgctcctaacagaacttttaaagtttctaattgcatactccttatcccctttcaatggcatggacaatggtacggtaatcgtcatgttcataactgcaggtgacaaacgtatagatttgtcctgcttttcttaactcttttcgactcatgtttccttgaatttcactcctttccatgatttctttcaaaaacagtgacttctctgtatcactttcaaactccaccggcagtgtcgtatctgcctttctcgcatatgctgcaaagaccttgagcgatatcttttttgccggcatccaaagagttatcctatgtgtgtctgcgaatgtttgtttccggaatttcagaagatcagcaaacatcgatccatttttcatgtggtgtccatagatgatgctgttagcagaaccaaagtccttcttcgcctttgcatccagaaaaatggctcctgaaggatttctattgcctaaaaatgtttcatgaagatatttttcattgttctttccctggataattggatagtcaatctgggtatccttgacttggatccatccaacggtatccggatttttcgtaagaagcgcttgaaaatcaatgccttggccgcttttgttcttcttttttgactttttcacctgctttgtaatctcctggtactcctgatttgcttttttatattccttctctgttttaagcagaaggatgctgcagcatataatcacagcaatcagcagaaacattgcaaggttgatcagtttgtttctcatttggcctcctttaaatgatttagatatcgaaaagatatattttttttcaataaccctttttatttcataacccattgtttaaactgggtgacattttaaaagatcaaggtgcacgggcccttctgccggcaatccagaacaacctaatttctaaaaaaatacgaggccatagaaatggatttccatagccttgtttcgtctgctttatatgtatttcgggcccttttaaagcacttttatttgttccccttaaactacttcgatgatataaataaaacaggtaatatggacgatatacgagttttagagatgttttcacttccttcaacatgacaaggtaaatcatttggccccgatggtattttttcatagaatgcaggatgttttgctgttccaaacgatataagatagcatccaggcgtttactgcttagactgagatcttctgccatggaaaagaaatcaaagtatgccatagcctctctgtctgcgtgaaacactagatataaggctgccagcttttctcttgaagaaagagccttactgctaaaaatatgcgtcatcagatgcgctttatatccagctttcttcgtatggatctcttcttgatccaaccatgacaaaaagtcctggtcttctaaaattatttctttgagataaccatttgattttccgtaactcttctctggaatcgtaagataatagctatttgtaagctgctctccaaacaggtagcgttccatgattactaaatagcctttgatctctaactgctttagctgccgttggattgttcttttggaaaggctacaggcatcggcaatcgtttgaatcgctggataacagtagcctgatgctgtagaacgatgacataaaaaaactgcaacgattttcgctgcaggtgttaaatccggatctaaaaagatattctgtatgctttgatatttcataatttcctttccggccgttttatttctaaactttttctaaacagcattgacattgagaagaaaaggttttaaaataaaagaacctttaatacaggtagatattagtggaacaatatttactttaaaagagacttatggcaagtaagtctctttttctttttgtctattgaactccgggagtctccgttgtggatggatctccggccttttggttctcccaatccgaagtatcatgcggtgcttctgtcattttttcggttgttccttctgtcacttttgtactattttctgttgtggtttccaactgtgtgcttgatgtcgttgtatcttctggttcttttctatgaaaaatcagagccatggtcaccacgatcaccataactattccaaaaaagatggtctgcattattttttctcttctcatatttcctcctgctattttgatatgatccagaatggccctccggcggatgccgttccttttgcttcgcttgctatcagatctaaactccaggtttcctttgttctctccctggatccgcagtcagcgactaaaatttttccattcttgatcccacgtagtacaatgaaatggccaccgctggtaaagtgcgttggccccataatagcaaccactaattttccgcttttgagagctttcactactttttctttgtcttttcctactcccttacattttagaccgtaatgtttggccaacgctgggattacttcatgtttgcttccagctccggatacgtaatatccattttgggctgcccaggtacacgtttgacggggagtgaccctttttccggataacgtagaaatacagatggccgccgatgtcggtccacagccgcttttcttgatcgtggaagaaccataaggcaaggaagcccatgccgcatctccctggttgtaataggtaacctgtagtcctgcgtttccagcaagcaatagaatctctgctgaagaatctccagtcgcgatagaataataccgcattactttttcggcgtgattcggagtacccttggctccagtcggcatcatcgtagcactatattccttgcttaatgccagggtataccgccctccatgggctttgatccacttaatccacctcgtcattccgtagttataaccttggaccgctgttttaattcgatccaagtcataagggctttccacctctgcggcttttagggcatctcttaattcctggacacccgcattgatactgcattcagagtggccagttggaatcccgtttggaccctgatggtgacctccgcttttattttttgtctttaggcagtacaatccataaactccctctgcagcctgcatagggtccggctctgttcctccagactctgccatcataagcgccaaagccaagtccgtgtattccccaatcttatattttgaacaataattagaaaccatcggccgataggcttctacctgttctgaaagaggctctgcagctgttcctgatgaggtactcagggaggaaatagcaattaaaaacatgaaaatagaagctaccggtattccaatggctgctcctatcttttttcgtgtatccttatcttttgtcttctgaatgagagcaatcgctgttcctggattcatcttatcttcctcccgcagagccaaagtactgccatttgtattctggtatttcaaaattaacatgcagccttttagatccaatgataaagagagcgtgtgctctttgcttagattctaataattcctgttccgcttccgttaaattatacaaatcggtggtttcttttaggttccttccatccgatccaaataaaatcttgtagcaaggagtatccagcaatgcctgaccatacattttcactcttgggtccaaaaagtctacaacactatgactgataataatcatccctgcctcatatttacgatcacgttttgcgacatttcttaggaatactaaagattgagggacttccggatcgatcattagatatccttcatcacatatgagctgcactttttcatttcgatttgcagacatgatattccatgcccaggtttgtagtaagaaatactgtgcccgttttgtattttcggaactggattgaagcgaaaaggtatccagtactacacattggttgtctgcttttaaggtcgttggcccattccacagcatagagtccgcaccctgactggcatcttttaacagcttagccagcattgcatatccattcgtatcagcctctttccttgttttttcaagttccgactctttttccttcaatttaccatataaatgctccatatatggaaaatcggtcggtttcaattttttcacatctgtatcccatgtgatgccgaaatcattgtagagttcgatgatagcgtcctttaaatctgcctttaaaaaatcatcaagactaggtaaatagagtgagaagaatgtctccagatgtttgatatataaggccatgtctccgagtccatgtccatcatctcgatcatagtaattataaagagcattttcttctgtctccgcatcatcatttttgggaaccggcatgatatgcagaggatttaccctggcatttggcgatccaccagcattcagccaagtcccattaagttcctgacaaagctccttatattctgtctctggatcaataaagatcaactttgttcccagcatatacaatcccaaggcgatatgctttgtggctgcactctttccaaggccgggctgccccatgataaccatattggtattcgtgcggtcattctctcgtttccaaaaatccaggatcaccaagccgccgttggcatccttggctacataaaaccctgcattatcgttgtatcctgatgaggagaatggaaagccgcctatgtaggaacgcagcggcatcactcggttgcttactttgttgatctccgggatttccatatagaatgggcttacatgctttaatccttcctgttggaagaatgaaagattccggatcttacaatgggccatgccgcaggtacccctcattttttgctcaaccttttttaacgcttctctatcttctcccatcggaatgatcgtgacgcttagttccccgacgttttcgccattttggtcgatttgtttcatgagcatctctccatcctttgcggatttttctgctcgctgctttttcaatctatctttcgccatctccgcttcctgagcgtaggtattaatattataatttaaggattgaatgatctccccgtcattattgggattgtaggtgatccccaccatggtcgaaggaatattggtgattttactaagccacccatactcaggtccggatggatatttaataattccataggatctccctagattttctccgatgataaacgaattttctttaaattctaagccgattggtgctatgacatttaacagagcaggattgatctctttttgctgcttcttagccatttatctgtgcctcctttcccttcaagaccggaattgtcggttttatatcttcatcttccatggtgatcaccgctggattgtctactaaattacataatcgaataatatccgcttgttttaatatttctgttttgattcccgtatgttcaaaatgtctggcaaagtcagaaatatgcttttttagttccctttcactatcttctgtgtatttctcatagatatagaaataaaactgccgctcaacgacttcattgctaaagctaaatcgtgagatctcttcaatctcatatctaagtaaatctttttgtattggattgtctgtatccttccgaagctcggtatattggtctaacagcagtgtaatatctacgggccggctgactgctaaaaaatgaaacggatctttctccgttgataattcactggttatttgtttaatcagggtcttttgctcccgaaaggacaacaacgcaatcgagatcggtaaaattttaatataagacacgatatatccatctcttgtatataaaaagcagtcttcaatttctgctacatttgtgaaatcctgcgccgtttgctgcttcttatctagcttttctttttttctggccaagttcctgcctcctttgctctacataagaattgactttttgttgaagttccgctgatacatatccacaatcaatccaaagcggtgatatatcgacatattccttttcccctacccgaatcacctcaaaccccatttctttcatcacttgcactggtattgtaatctttgccataatcttctcctctttggttctggccaaccataataaaacgaaagaagggctgtaaaacgcccttccttttatgtaaacggtagttcttcttctaatccatccgaaagattcataaatccgtcttctcctgctggtggaggagcggtttgatttctctgttctgcagctgcttttgactccgcaaaatcctgttcttctaccacaatatctgtggtataccttttgattccgtcccggtctacataactgccggtccggattcttccgctgatcacaatttttaaaccttttctaaaatatttctccgcaaactctgcggctttcccgaacgtaacacacgcaagaaaatcagcttccggttctccctcccgcttaaatctccgattcactgcaagttgatacctggtcactgccattggcttttctccctggctatattttgtacttggatccgcagttaagcgtcccattagaatgactttgttcatttggtactcctttctagtgttgggtcagttccatcacaatttcttcttcctcaatcaccccgtctaaggttggttcctcatcaagcgttgcttccttttgccagacgcttcgtctggaaagcagccgggtctcgtcaattcccggaatggattccctggataattcagatatttgctccggattcttttccatctcactcatctgtttttcaatctctttgatcgtctgtcccagggtctcttggctgctgatcataaaagggatccgaaactgtttcagcatctgccaaatggaaagatccagatcttcactttcccttaaattttcttttcggttctctttttggtattccggccccctttccaggtaaatattaagatttttatctttccgaaaatcctggattacgttctttgaaaattctttgtctggttttcttacatacagtggatagaccgataatggagaatctgttactatgacttttgaaatttccgcctcctttttcattttctgtttttgcaggccatataattgtttctgcatctgactggatccgtccagctgctttggatgtttctttaatacttctttctgtggcccagggacataggctgccgcaagtccttttcctttgaatgtctctacaattttttgtgctgcctttcctttgccggcacccgggccggcaaacaggttaatgatccatggtttgtcttttgataactgctttggttccttctgttcttttacaacatttttgctttccttaagcaacaactgataagataccagcgtacaatcctttggaagtgcctgcatcgcctggtgtaaaaagtcaaatgtccgttttttcttggattccggtatgatttccccggtcttaggatccgtttttacaatccggtatctctcaaagccgtcttttctcgtaaagtttggatccttcgcttggtccgaactttgaatggcccgtaactgtttccattccataagctgcctcctaaaaaggagaacgccaaagacgttcccctatctgctatgatttattctgtttctttttccggtaaagccagatcaaaccggcagctcctgcagcaatgacagccacaagaagtccaggctttgctttatctaacgttttcgcaatcttggatccaacgcttggctttggtatcttgatggttttctttgcattcgccggcacggtatcatccgatgtgacctcaaccttattggtaaggctcttcccttctgtaccttccaagattttggcctgataggtaatgactgctttctggccgtacaccatctgattgatctgaacggttaaaacatttccggtgacctttatttcatatttctctaccccagatactttgatggtatccttcttaagctctaagccttccggaagcgtatccttgatcgtgatattctttgcggtatctcctggtttcgtcaaattgactttgatcgaatacgggatcagatctccgatctgataatccttatccttcgcatcctttcgcaccgcaaacctggtatcttttttgctgattttaatcgtattttgagtttgggcctcttcggagttatcggcctttgcttttgctgtattaaccacatccttgtctttcaaagcttcttctttgaataagacatcgtatgtaatcttcataacctccctggccaggtcagcattggtatggattgtatacttgttatcctccacttccagtttacactgagccgtaatatcctttccggatactgtcactttcaaagacgcaggatcaatcaccatacctttttgatcaaacgtatcttcaactataacgttcttggctactgcatctaagcgttcctgggtaatcgtcaaggtatattttccgatttctccaaggaagtattctttttcattggattcttttaaaatctttaagaccggatcatccgctgttttgatcgttacctcatgatcgatttctttttctggggcgttatctgcagacacagtcgctttattcggtacctgtttattttccaaagatgcttctttgaaaagcacctggtacgtgacttccagcttatcagcatccgtcagatctttcccggtttccacggtaaagccatctgctgttgcttcaattttcgttggagtgatcgtttcgccattaaatttaaccacaaaggaatctttgttgatctcaaccccttcgatgccaaacttatctttgatgaccacatttttggccgtctccccttctctggtctgttttgccgtcaaagtgtatttgccggtatccccgactttataaactcctgcgtcggaaattttcgtaatatccaaatttggtccctgaattggaacgacttcttcatcttcctttgggatatcctcatctgaattaacggtggccacgttggtaacatcctggccggacaacttctgatccgtgatcactgcctggtattcgatcttaaaagccgtttccttggttagattcaatggatttaatttgtcctgtttgatcagctttccatcataaatagagtatttatcagtcggacacaccaggttcttatgtgttgtaatatcaaagtcattgtttttgacaactacatccacatcttttaacacgcttccttccgcatccatcacgaccacagaatttttctgcagctttacgccatctgtttttaaaacatcctttaaaacaatgttcctggccacacagccaatcgcatcctggctgacatcgaccgtataggtaacggtgtcccctaccttgtatttttctttgtcggctttcttggtgatctttagatccggactgttgatccacacctttgcatctgcctctttttccggcactccaatggcggcggctttcgcacggttgatcacttcatttccatttactccttccgctgcagttgcattatacttgacagtaatcgtgcttgcctgcggcagtgcgtaatccccttttgattttaggatccagccgttaccagattgggtcaatatgaagtttgcagcgtcaatcccggtcactttgatagaatcaaagtccaaaatcattccttcggggagggtaaggtcattgatataaaaataggcggtatctgccattgaattcttttgattggctgtaaccgtataggacaccgtatcgcctactttatgctcgtatttatccactgttttcgtcacatcaaaaccagtgaatgaatctgttcttctaggtagttctacggttgttgttaccatattggttgtcagatccttaccgtcaatgatagttttagctgtgtttgtaaatagcaatgaagtatttgcagaagcataatgcccgtgctcctcccatttcttttcaagtgaattcttttgttcaactgtccaattttccggaatgtttatctttacagtgatcttcaggttataggccccataggtataaaactttgcgttattgggatcttttaatgtagccgttaccttttgaccatcctgttttatcgtaaacatactggaaacatttatttcttccccatcggagtcgattgcggttatctggattttgttcacttttaggcattcttcaatcgtatcttccatcacaaagcttttatagtaatgggcttccggaatgtccgtcggtatattctcgcatattttgtaggtgaatgtttcagctaaagaccgcagagtattggatgttgtgtcagtctcatcattatcgctcacttttttaactggatttgtcggtggaaatttcaccatgttttggccggttccggcatattggttctctccagttggttttgcaatatttcttccaaaggtatactcaaaatcgctggattcaaagatgaaccctactgcagattccggagtgctgttcacatttccagttggtgaagcatacacatccatacttccacttttcttatataaaagattcgtatcctttgctacatactgtccatccacttttgctgctttgattccgatatactgatcgttatccacatctctgagtgtgacattggtacgcaatgttaccggtgtttctgttccagccttgaagaattgggttttcatggtcagttcttcaatggttccggcataggatactccatttagtccagggcgaaatttgatatacccttccttctttccatttccgtcttcggaagctacatcatatgctgttatggttttcacaacatctattttcacagaatgaccattcttcccgtttgtgtcacactgccaaatgctgcagttggtaaccttaattttaatctttcctgcagcattttgggatgtcttaaaagcaggatatgtttctgaactctcaatttctccggactcagaagatcccgtcattttcgttccttggataatctctgtttttgttttgcttgttttctgtactttaaatccataggatggatctacaattaaggcatttgagtcatcataagatgaataattatgggttgcatcaccgtccactttatctgtattttgccatttttgactcccttcatggttattctgtttaatttcataagcatcacttacactgattttcgcttgtaccccggtctggatcagacctaagatcagcacaaatgatatcataacggctatggctatgatatttttatgttttattttcattgctgttcctcccttaaagttgcgcaacaaaaagcaccatagttacctatgatgcttaattagtttcctgaaatttttatatttaatgatggatctttatttttaaacatacctcctcctttgggtacaaaaaaaggaatagaaagaccttctattcctttcaactctttaatattctacaacggttcctccgccaatctgataatgataataactggccatcaccaattttccatttttataaccatgcattttaatatttaaataggcaatattgtttctcttatttcgataagatggactaagttttacagtttctcctggcttgattactcctgtatgatgtcctgtctccggcgtcggagcagaaaagtcatcaccagaattattaatagaataatagattgtcacaccattcttggcagtaaaccattcaaactctccattgttatcttcattcatatgatgaaagagatagcctcttcgagcctgaccatagccaaaaaatacatcaaagtaatccctatctttcccatacttataatccaacccatgactcacaaaagtattcccgtacttcttgatctttgcctggaagtcggccagattaatatcatcgtcaaaacccggcaccttgccatagtatggttttcctccctgggtataaagggactttttttccactggagctttctttgttgctgtctttacttttttacccttagtattatagaccgtaatggttgccttggacgtgccggcttttttcttcagcttgatgctgaaatacccggtctttttgcttgattttttagaataagtcttaccaccaatctttattttcactcgatagcctggctttacatagcctttgatcgttttactattttttgtaaaactcttaacaaccaggttttttgtaagcacatagactttcttctttgtgtagtatttcttccctttgtaagctttgacgtaaaagctcttccctacggcctgttttgggatctttatgctgtaagtccctttcttgctggctttagccttgtaggtcttcttcccaatcttaatctttacggcatacttccctttggtctttcccttcactcttgtagtcgtattatagactttgttcacactcagtttctttttggcagctttcacaccagttcccggcagtagacttagagaaagaatcgccgtcagcgtcaaggctgctgtcctcgttaatactttcataccattacctccttcaatggtttcaaaatatacagtaacattggaacaacttcctattctctctctctatgctctacattatatagtatatcatagaatttgttccagtttaccccatcccttaaaactttttcaacaaaaaaagactgcagctcttttttctgcaatccttttcatatttctttgaatatttttacttgaacatagaatcattatattacatataattgtaggcggccttatgataatcaatgacggatatttcttgcttcaaccttttaacagggtcaacaatcatttttaaggacttttttcctcatgactaaatattcaaaacataaatcaaatataaaatcaggggaatagcagcaaatacgaaaaggtcttttaatgttattagatagtagccatggatgagctccaactgctgataaatctcattaaggtactcttctaattcattataattatgtatcgtgcttaaatgagtcagatactcatctttctctctaacgtcaatagctccatgctcgcataaactacaaagattttctttatgacttttttgaatatgttttataaagtcatacatattttctcgattaatatcaggcagctcatccaacattttttgagtttttctttgttgtcgtaaacaaagatccttataactcaaaaggtcaatagcaattatttttttagcagtatatgtttgccccttcaatttaattatgatcctcctattctaaaatgtttcctatccaaaccgcatattcctccagcggaccaatcggcatatccatataacctttacagctagcatagaacccgatattgtccatatactcctgatccactggacagaaagctttgtagctgccgtattttatctctatcttctgtcctcccacttgacttttaacaatatctccctcaaaaatttcctttaagtttcgatctgtttttcctgtacttttctgtaaaatatattgatcggcactcacttcttgaaattttccattgctttgaatgatataggtaccattggttccagcccagaaaggctccacaatccaccccttttgctttttatcccatagacgcatattttccatattcatcacctttttaacctttcttttaaaaaatctaagatgattaacaatgctatgatcactaaaaaatattctgtttcttttgtcactatcatccatactgcaattaataggctaaaaaagtattctaaccttatcataatcttttgcacgaattgcttcataagtgctatcctccaaaatagtaattctattctgatccatgctcaaaccactggctttcttttttgtagttttaccatcgatcttctttaactcatccaaagaaatttccaatatttctgccaggctgcaaatggtataccatccaggattcttactagcttctgtctctatattatgtacatttgatactgcagtccctgctcttctggccagctctgactttgacatccctttctccaaccttactttctttattacttctccaatcacttgattccctttctaaatatggtaaactattataaaatgaattttacagaggagaatactatgtttcatatttctggcattataaaaacgttatcaaaccataatctctccacattctcactttctctctatcgcttttttactaggttgtttttaattcttcttttaattcttgccacagagcaggcatattcgatacactctttcatctctccttacatatcagcatcagctatatcattttattactctttattgagtctctgctttttcattggttctacattactatgcttttttatcattctttttcttttccttagtgttttaagtaagtttagcaccaactttgatacattcagaggaatcctcccatatttggatggagatgttacttgttttgttgttctcagtcgattcatttatcgtcttaaatatatgatctttactgcttcattcttagttgttgattcattcatttttttatacttgcttaaaaaatccgaaacatcctttttgattgattatttccttgatcatacttgctacctcttagtcatttttgaaatacttttcatcttcctttcttttgtagctgtacctataattacttacaataattatatctttaggttaacggaagtaatggaaaagcgctataccaacgatgactccaattaaaataaacagaagaagaaacgtggtaaattcttcttctgcctttctttgatcataatactgttttatttctttagaagtcgctctatttagttttttattcccaaaaagccgttcttggagtccttggatataaaaagaatactcaaggaagcttttcgttccctttaattgataaacttcttcctgaaacatgacttcgctgatacatcttctgtcatagagttccatcagatcagacagcatctctctttttctcatttcaaaccataattctatatttccagcaggaatttctaaaattctttctttgatctctgataattctttctgattttttttataagcctttccaaaatttctttctgctaaaatctgttcatcagactccttatcgctgtctttcgaggcatgattgtatgacatcttacctgcagttattttattgaatattttatataatagcttgtcaaaaaacattccttttctcatgatacctcctattcaggtccataattaacatcaaatcgctccgttgttgccgtaggctttggcttttgcgtcgttgtcggctttttctttcgtgtcgttgttatttttttctttcttgtagtcgtaggttttggtcgcttctttgatgtggttgttgcagttcttgattcttggcttaaacgtctggttgcgtccgtcctatttacagcggctgcagtcgtcgattggctgggttccgaactgctctcggttgttggcttttctttcttcttttttgcagtcatcgtgactttttctgatgacgtttcttttgttttttctgttgtagatgacaaaactgtagattgctgttctttgactgcttctttgatcttttctttcttctgaccggcagaaaaggttcggaatccggcagctatgatgcttatgaaagctaaggttccaacaaagaccatcaagcgcctttttgttacatacttttctgcccattcagagaaatttaattttggaaaggaaatcttcggtaacttaagttttatcttcgtcccagtctttttggctggtttcggcttttttatctttgatggccgttcctttttttgaaaacgtttcactcgatcctttttttctcttggtttctttggtccttttctcttttttggctctttcgtgagatgccgatatcgtttcatttttgcatctggaatctgcagatgcagctccggcaacaaatctgcataaaaatgttcctggcctggtttaaacggatgttcaaatgctgctatggtatagatctgtccctgcaaatcaactctgattttttttccttccgggctgatccggaaacgatagtcacatttttcaaacatcttttctttctgttcctctgtaactccaaaatcaaacagattaattaacgcctggccgatgaccaggttatgtaagattggaataccatcatactcgtaccccttctccgtctttaataacccatactttaatgccgcttcttctagtccggattcttggccaacttctgtataaaccaataaacgttctgaccttttgatacaatacaaaagatttaaggtaaaccttttggcaagttcaggatcttgatctgtgatcacccctatctttttctgttcttgctgcagatttacctttttcccaaatatcattgattccagccgttcttttaaaaagccatccgtataaattgttctacacttcccagtaattcttttttcttctttctgggaagtgatataaatgaattttgctcgtggaaagcattggatgactccatcaattttagaaggatcatcaatcgctttttcttcaatcacgatccactctggatccatagccattaaatttgcatattcttcccttaagaaaaaattcagatcatacctccacttaacatatttatgtatgaacttttcttcggaattctgcagcaaatttgaatgatcctcacttgctaaaaagacaatcatgatccttctccttccctatttattttttccttctttcccactcattttgatattgatacaaaaacttttgttgagatctgtagaatcgtatcattgcttttataaaacctacaacactgatattcgcttcacttttcgtacacattataatcgccccaactacgccgattataatcgttaatacaacaacggccggatccggatacaccatataggcaagcgcagcaccaatgataaacaacattgtcaaaatgatagaagtatgcaattcttcttggccaaaccctggaaaatattctttccttgctttgacataaggtacatataattttccttccctctgtttttcttccatgacttttcctttctattggtagtatttcactatgatgttttttagcggaatgatagtaactgcaacaatcataaagatcaagagatttcggattctttttttatttgaatcctttgcatctggatcaagaatacattccgtacataacattgcaatacggacacctccaccgacctcaattaatatcaaaaaatattttatcgcctcattgattgtccccattacttatctcctcatcacatttctaaacatgctaagagtatataacttactgctgataccgccaccgtttctagcaattaaaagttcttgcattaattttggagtctgaagagctgctccaacacaagcgattgcccaaacaggatgcagtgttaaacacagggcgatggcaaaacgcagcaaaatgatctgtatggtgcatgtaaaacccatttgcagaaactttttaattgttactttgaaaactcctccatcgctatccattaatcctacgcatgtaatcgacaggctgtattttaataccataagctcaaagccatttttaataaagaatatatacagcactagaaccaatacaagaaaaatgacaacgaaaagaaccgttgataatcccctccctaataatgtatcgataatttcttgtttgatttgttggatttctccctttgatgtaattgcatttacgacctggtttgtaaatgatttaaatactcccataaccggagtgtataaacttaaaaaagacactgcgattgcaactgcctggaaaaatccagtgagcaagatcaggggatcatgatctggatctccatctgactgcataatataaatcataaatcctttctgtagaaatttcaggacaatgagtgcaagtgcaaattttaaaattgtactatttatttttgcaaatgaaattccctctaagtgaaaatggctgctcatatatttatctgcattaagtacaatatctaagagatctacaagaaattcattgatctgctttacaagatcttttgcaagatcttcaaaaaaccctgaaattccatctgttataaagcttgcgagcatttgacctcctttttatttgtaatatgacaataccgctgataaagttgatgttaccagtaccacaccaatgcagcacactaaaacggtaatggctctcttcttccagacttttgcatccatttcatctgccattttcatgcgcaccaaacaaaatgcaatcacaacggttccaagtaaactgctgattgctataattttcggtcgcatatcttttaatagttgttccgttccggtaaagcctttccagtttgatattttccctgcccatgcaatctgaatagaattaataaaaataaagagacttgtcatgcaagtccctgccaacagtttcaattttcgtttcatgtatttgtttcctcctgtttctttgtagcctgttttgctgcttttgcctgttcctgttgctcgatcataagatcaatctgttgtttccagtacgtccaaatcccccaaagagccattgtttcattatgagatctttctattttctttctttcttcctggctttttaatcgtattttcagattacgtcttctgcttcctaagcctaaaaatttattaaatgtccatttgcttaggtctggcgcataagtaattgctgggtaagtaccagataatattaaagaatttggacggtctattttaatgatttcttctggaaacaataatttccttccagttagattcgtgctttctcctcggttcccagatgtttttaacgaccctactggttgattattattcagtgaatacgttgataccgtgtaatctccaaggtcattagctattgactttctagtatcctgattagggcagcgaagataaatggtcaaatcacagttatccctaataatttgtgctacttcttttccatacacatgatccaactgtgcataagactgaataaacagattatgtcggactccttttccggtaagaaaggataattgattcggaaggttggtaatcttaggcatatttccaacttcatcatcaataaaattgaaacgacgatccagccttccacccattttatctgctattgcatcgattcgatctgatatttgccgtaaagtcaaagcggccaatggaaaataagtttcatcccgtgctggcaaacaaagataaatgatggtcttttcccttttcattagaatgtcttctaaatcaaagtcacttttactggtcatgttgttgatacttggcatagtcaaaattcgaagtgtcatgacagctgatacatagaaagatgcccgtgttttaaacgctgctatattcgttgctgccagcagtatcctcgatggatgtgtttccggaagtgattgaatataaaaaacaagaggcattgcccctcgatactccgtacacatttccgttataaagtaaaaaacatttgtcaagttctgatactctggatgatccatgttatcatagacaaccgccatgatggatgcagctaatgtagaagcttcaccactattccataatttttccccattttctggcggctctccgactagctgcgaaaccagattccatgtttcgtaaattgcttttgatacgtctttttcttttaatgcttttataatcggctctaaataattgtaacgatccgattgatatggatggataaaatcaatacaaataggtacataccctaactcttttgcttttttcgcagtatagtcataaagttcctgtttcatatcaattgcaaaaatattttcacccgcaagcataaggtcacagattgtctgcagcacatgatttcttgtttttccggatctagtagctccaagaatgattgtatgaagatcatcagtaatatgaaggattttctcatatccttttttctgatctattttcccaacgactagtcctccggcaggatacaaaggtttttctcctgaatattttaaaattttattcttggataaaatttcggaattaaattcctcttctatttcttcctttgtaagccatctttgcgttccaaactgaccctggccagctggcaccggtgttttaattttcttagttatctccattaaatcacttttataggttttagtttctgaaaaaaacaggataaatcctccaagtaaaagtaatataaagaaacttatcgtaaactgtaaaacaactggattctgtcgcaaattgtggataatttcatctggctgtgtcacatacttaatatgctccggattctttagaaaggaatctaaaaagattgccgcatatccacagagtaagaaaagtacaatcaggccaaggcatccagcaaataacagtaaaattttcttcttcaacgttcccagtccactccctttcctttttctctctctttttgtctttcttttaaatattcaatggaatcacccctttctcttgcttgatggggataatccccctcttttggagaacaaaaaaaacggagcagataatataacatatcgctccgtttttgctcttcgatcgaatctgatacataggtacctttttcgattttctttaatgtttccttatttatctcaaatttctctaaaagggcttcttttgtgtaagcctcttttggatagaaatttctatttctgaccgcctgatgtccaggcttttgaaacgtgatatattcgtgggtatcatcccagcgaacatgatactgttgttgctctaaaagttgtataaattcctcctgactcgtagccaccgctgtagcatcccggacggcaaagaaagcttctctccggtaagcagatgcctcttcttttacttcctctggagttctttgaaacctcctggcattttctttgaaacattcctgaaaacgctcctttgtataagcttctggaggatcaaaacgccaattcctgaccgcctggtgttctgaagcgataaaggtaacatacttcggattccactttactctatatccctgtcgattcatgagttggataaattctgactgactggcagcaacacgtaacgcttgttccacggccagctgaatttcccttttccatgagatccccttttgctcggcttgcttctcagtttcactttttcccctgtgaattcgggatctatcaatgatagataagttatgctctttacaaagttgatcattaaaacttttaagttcttctaaattctgatccgtacactgccacttatatccagtatcaaaattcacactgttgatgatgaagtgtgtatggatatgatcccgatcgttatgcgttgcaaatgaaatctgaaacccttgaaatttctcatgtttcttaaatttttctgctatttgaaaagcttcctgggctgtgatttccccaggtttgaatgattgaatcagatggatacacatccttcctttctctttaccccaggcctgtttggtaagcataaattcctcataggctcgatccggatttaatagataagtccctccccttatttccggcaatgttttttccaaattattaatatacttcaatactttctccattttcccctttgtgtcatatttaatcggttttccagccttatcggtagcaaactcaaggattgccatagttatcctcctctaatttgtattaacgaatcaaatatatcttgcagtaactgattgatttcttctaagtctaccgcaaggatctgcccctcatgtgcaagccttgtcatctggtttaaattattcccgattttgtacaactgatattgaacctctcttaaatcctctatcaccgtaatttgtccttccaaagccatttttctgacataagaagaaaagttttcatggactcggctggctttttcttcaatgataagcagttctttttcagaaaaccgaatggatttaggcagtctcacctcttgcattgtctcttctcccaataatcatataattgaataaaaaaaacacctgataagtaaagaggcaaacttatcagactgaaaaatataatattcatgtttcccctctcttcgtactaattcttttctcaactaacttttaattcgtgctatattagagtagagattagtacctctattctttatttttaactcttcgccttctgaatcgcatcgggttgctttaataatattgtcctcttttcggaatcctgtttatattctgattttggatctaggaaaataacctgattttttctacatttttgtaagattaacgctcttaatgagaacattgacatttcttctttcataatttgcctccattcaataaaaaaagaagggatcaccctccgtttctcctatttgcgtattcagataaacttctttttgttgctattttgtaaatgtgatcaaacccttgtaaatacatttctaaaaattccgaaaaccaataaacaatcggataaggtctttcaaattgcttggatccatttgcttgcttttctccttttcaaccttcttttatggcttttttcttatataaattactttttcatcatcttcataatcaatataatattcagagacatctttgtattttccaagcatttctttttttactttttgggaatatatctctttatcttcaatctgtaatttataattcttgtcaattctactttctaaactttctataaattgcttttgctttaaatgtgtagtgtaattttctgtctcttctgcatatacattaaatatcaaaacaaagactgtaattgcgctaactaatattgtgatccacacctcttccattaatgatataaaaagacaaaacaatatgaaaacaagaaatacgataataataaacaacgtaaacgaatgtattttgcaccactccgccataaggacccctttcttttaaaaaatttccctcagtcacaaaataaatgtttttttcctgtgtccacgatcttagtagccagagaccatattctatttttatttctttttatgttatatctactaagaattttttaaaagaaataaaaaccaaataataaaaatagtatttataataagtacaaaaaataatgtacatgctagaaatctatcaataaagtatatatattc

SEQ ID NO: 27 - DNA, 36151 bp, Anaerostipes rhamnosivorans
gtatatatcaagtttataggttttatatttattaataatatattgaatcttcttcttggacctgtccagttcttgtctttattgtataataatctatcgtcgaatgcaaccgttttctgtcatattgataaatcacgtttgtaccactgtccgcatatactataacagaacgattttcgggtggacaacatggcacaagtctcaacacagcgggaactgcagagcgccctcagcgcaaaggaaagcctcatacaggtgaccgctggttttccaatctcttctcagatcaacataacctacggggtaaccatagaaagccttacatcaaacaatatttttactctcacaaaagatgcttcatatttcagctacctcttccgggtcagcggcggctccctgacgtttcaaaatatcatcatcgatggaaacaaatcgtcccatgagattggcaatacggccaaccgctcccttgtctatgtcacgggaggctcccttcacctggctacaggatctgttctccagaataacaatgcggcatcccaaggcggggctgtcaatctcaccagcagtgtttttgcagcaaacacacttgtcatggatggcaatgcagagatcaccggctgccacacagtctcaaacggcggcggcattatggtcaattccatgaactcacaggaccgctgtaccattgcgggccagtctcttatcgacggcaatactgcagtcagcggcggcggcatcttctgccgttcctatacagagggtgtatcttcttctctttccataggaggtgaagcccatattaccaataatgccgtttccggtgccggaggcggggtcaccttttccggctacagggacggagccagtgccccctcccttcttacactgtccggtaactgtctgatctcccaaaaccaggctggcagcggcggagggatttactattatgcctccaattcaggggatcggctgagcatgacagaaaacagttctgtaacaaaaaatacggcttcccagaacggcggaggaatctttatgactgttccttcaggaagcggcttgatggacgtagacaatgcatcggtctccggcaatttggctgggaccggaggcggcatctatctcctggctgacgccgatgtttccgtcacagtctccggggccggatttgaaagcaacagtgccgccgggggaacctctggttccgggggcggactctggatacaaaatcaatccagccaggctaagacagatgtttcatttgacagcgtccggcttctcaataaccaggcatcggccgcaggcggcggcatgtttctggcaggaggtccgggaaacttgacgttcaaagcagacggaaccactgtgggcggcaatcttgccggatccaacggcggcgggctccttgtgagtagtttgggtactgcctctttgcaattcggccagacgatcctaaaagataatacggcagacgcctacggcggcggtatgtactatgcaaacttagcagcagggacttctgcccaaatcgcaatgacagactctactgtttctggaaacactgcgggccaggaaggcggcggcctccgcatcggctccaatgccggaacacttaagaccactctgacggactgcacggtctcaggaaacactgcccgcgagaacagcggcggcggtatctggaacggtggcagccatgataccctgactcttgccggatcttgcatcgtgactgaaaacagtacggaacagggaaacggagggggcatctatttcaacagcgacaacggctccctgtttttaaccggtcagaccaagattacttacaaccgggctgatgcaaaggccagcacgttcggaaaccacggcggaggtctatgcattgtgcccggaaaggtgaccatccaggatgacactgagatcgcatacaacagtgcccttggctatggaggcggactgagcgcctctgagcagaccagtgtttccatgacgggcggcagtatccacgacaaccgttcttcagagtacggaggcggtgtgtggaatcatgacagaagtgtcttctctttgacaggcggaagtgtatataataaccaggcagaatatggaggcgctttttacaacaatctgggcggaatcctgtcactgactgccggttccttgtatgccaaccacgccaccgttggaggaggcatctacaatgcctcctcttccgatacgacagtcataggttccaacgtgtttggcaaagaccgcccgaatacagcttcttcctatgggcaggatatctacaacgaaggctctctgtatacgggcggggaacgcgagatttctaacggagtctatctggataaccggtccgccgttgtaaagatccagggctccttaagtacaggatctctcatacagttggaaaactcagggtatgtgactcccaatgcacagggtacccctattgtggtgggggaaggcacagcttcctatcctcttctcacccagactgatgccgatgctttccgaaagcctcctgccggatttgacggctgggaaatccgccttagtgaggataggacccaggttctgctggcaccggtcaattacacgatccactacgaaaacctgatgggtgcctcccatacgaacctttcgtcttatacgatcaataccccggatatccgtctgaacgcacccggtcctcttccgggctaccgttttctcggctggtttgacgctccttccgggggcagccgcatcactatcattccccagggaagcaccggggatttgacactctacgcccgttgggaggcagtcagctcttatactgtctcttaccacggcaatgaatcctgctgtcctatggctcactgtgtcccatggcctctcacggtggaggaaggcagcagcttcctcatatcaagacagcgcccagtaaggaaagggtaccgtttcctgggctggaatacagacccctgcggcaatggcatctcctaccttccgggtatgactgttccgggcatccaggcagacctgaacctctatgccatgtggaaaaaatgctgttccttttgtatgaactgaatcagccaacgagaaaaagacagcagtccaaactgctgtctttttctctgtaatgtcaatatgcttctatcgccgccgtctcataaggtctcaggattaaagccccctgcccggtcaacagctctccatagttcccaagtacaagtctgtactccttggccccgctttctaaaggcagaacaacctctttttttgtcaggttatgaaaggccagtatttcttcctgatcatgaaagcgcctgtaggccatcacatccgggtgctccctgaaaagaaattcaatctgtccgtctgcgatcacagatctttccttccgcaggcggatcagtttttggtaaaaagcatacactgagtcaggatcccttctttgtgcttttgcattgatggtttggtaattgtccggtatggagatccatggttctttgtcagaaaaaccagcaaacttatcactggaccactgcatcggtgtcctgccattgtccctggatctggcccttaacacttccagcgcctcctgctccgtttttccctgttctctcatgatccggtaataattcaggctttccacatcccggtactgtccgatctccataaaccccggatttgtcatgccgatctcttccccctggtaaatataaggggttcccctaagcagatggatacaggcagccagcattttcgctgactctttccaataccttttgtcatcccccaatctggaaacgatccggggctggtcatggttacaccaaaacacggcattccatccgttttgctcctgcatattaagctgccagtcttccaaaagccgtttcaattccaaacgatccgggtccatcagctcccatttatccccgctcttataatcaatctttaagtggtggaagttaaaacacatggacaattctttctcctcgggcctggagtatctgatacagtttttaatatccgttgaggacatttcgcccacagtgaccatatcctcaatctttgtatccctcaccaactcttttaaaaactcgtgtacatgaggaccgtctgtataaaacctccggccgtcacctttcatgtcatcctgaaaaacctccggttttgagatcaggttgaccacatcgaaccgaaaccccttgatccctttttctttccagaaacggaccacctgctttagttcctccctcaccttgggattattccagtttaaatcagcctgggttttgtcaaacagatgaagataccatttaccaaggttcggcagatactcccatgccggtcctccaaatttggagatccagttcgtgggaggtgtgtccgggtccccgtctttgaatatataatagtccatgtattccggatcccccgaaaccgccttacgaaaccattcatgttctgtggacgtatggttaaacaccatatcaaacatcaggctcaggcctctttgttctgcttcccttatcaattcttccaagtcttgcatcgtcccgaacaacggatcaatgctgtaataatctgaaatatcataaccattgtcattctggggagatgagaaaaacggagtcagccagagaatgtcaacgcccagttcctgcagataatccagtttttctgtcaccccttttaaatcaccaaagccgtcatggtctgaatccctaaaagatttcatatagatctggtaaatcactttatctttaaactcagtcattgtctgtccctcctttatgatcaaatgagacgaccactgtctcacccgcttttgcctgcattccagtatagattttaaggttttctgtatttccctgttccggcatcacacagatgactgcgtctgagtatcctgcctttttgatcttctcccggtcaaatttgatcagcggatccccggccttcaccttctgcccctgggtgatcctatattcaaatccggcgcctcccatggcaactgtgtcaattccaatgtgaagcaggagttccatgccgttttccagagaaatcccgcaggcatgtttggattcttccattacaaccgatatggtccctgacgccggggcatacacggttccttcatccggcaggaccgcaagtccttctcccatgaccccttcagaaaatacgccgtcctttacgtccttaagagggatcactttcccgcttacatatgcctttaaatctgtttctacttctgtcttggtttcttcttcctgttctgcgccaatcccctttttctttcccacgatcagtgtcaaaataaacggaatgacaactgccgctgccatgcctgccgcaaaggacagcatagacgccggtttgatggataagataccggggatacctcccactccgatggcatttgccgcagttttggttgccacactgatgaccgcagcaacagaagatcctatcattccgcacacaaacgggaatgcgtattttaaattaactccgaaaatagcaggctccgtgacacccaggtaacaggatacgcatgccgggacattaacttcctgggcatccgccttctttctctgaaggaaacacatggccagaaccgcagatccctgtgcgatattggacaaagcgatcataggccagagcattgttcccttatagtcagcgatcagctgaagatcaatggcattggtcatatgatggagtccagtgatcacaagcggcgcatagacaaacccaaaaaccgcgccgaacacaaccttaaaggatcccgtaatccctgcatataccacgctggaaatggctgatccgatcttccacccgatcggtccgaggataaaatgggccgcgatcacagagagcactaagctgaaaaacggaacaacgatcatggacactacctgcggcgtgatctttctaaaaaaccgttccagatagaccagtgtcagggccgcgaggatggctggaagcacctgtgcctggtatccgatcatgtctaccttaaagaacccaaaatcccagaatggaatgtctgccgccgctgtggaggccacagagtaggcgttcaaaagctgtccggacacaagggttaaaccgaggacaataccgagcatctgcgtggttcccatcttctttgtgacagaccagcagattcccacaggaagcatatgaaagactgcctcaccgatcagccagagaaaactgtcaatccccttccagaactggctgatatcacagagtgtcttcgtgccattttcaaaaatatacatgctgtcaatacagtttctgaatccgaggatgagacctcccacgataatggccggaatcagaggggcaaagatctctgctaccacggctacccctctctgcagcagattctggtttttcttggccgcctgtttcactgagtccttggacacaccttcgattcccgcttcctcagtaaaatccttataaaactctgagacagcgtttccgatgatgacctggaactgacctgcctgtgtaaaggttcccttgactgttttcatggactcgatgtttttaacatcggctttgccggggtcgttaagcacaaacctcattcgcgtcacacagtgggtgacagccgcgatattggacttacctcccaccagcctaagaagctcttttgcatcctgtgaatacttacccatttcctttcctcctacaatccgtacttgtttaaacaagttccatgttttatttataccacacttgtttaaacaagtcaatcatcttttttatttttcttgtttgacatacgtcggagattgtctataataaggatagatgtttaaacaagtagggggattgtcatgccaaaatcaatatttgagactatatataaagacctaaaagagaaaatagaagcacagcagtacatttaccaggaactgctcccttctgaaaatacgatggttgagatctacggctgttcccgcaacaccatacgccgtgcagtcaagctcctggccgaatcaggttatgttcagtcaatgcacggaaagggtgtccgtgtcatctatcagccagtggaccagacctccttcaccatcggagggatcgagtccttcaaagagtccgcggcgcgcaaccacagaaacgctttcactaaagtggttctttttacagagcttcttgctgatgagagaatctccaagaagacaggttttttaaagggaagtgagctttattatatccagcgggtccggtatctggacaaaaaagccctgatcctggacgtaaacatgttcttaaaatccgcggttccgggactcacaaaagaaatcgctgagcactctgtctatgattatattgaacaagagctgggcatgcagatcgtcacaagcaaacggaaaatgacagtggaacacagcacccagattgatgaaaaatatatggaactgggggattatcactgtctggccgtcatcaccagccagacgtttaattcggatggagtcatgtttgagtatacccagtccagacaccgtcccgactacttctgttttcaggacacggcagtgaggaaacgctgaccttccttcataatagatcataaaaagaacagggattctaaataaaaaacttggaatccctgttctcttaaaaatattaaattaatttataatcagcatgttccctttgtacatccatgaaagcctaaaactagattcggagaatgatggtacatttaacgcttctcctgttttcatatatcttatccattgttcctgcagtcaaactatcaccttctcttttgtaatagttatttagttttgttcgatctttattcttcataaagacaatcatatcgttttaaatttgtagaattctgtaaatcaaaatatggaacgtccgacaaagaacgtcaattacttaagtattcttccttataattgaatctatttttattattccgttatcttagcccacaactcaatataacagtcgtcccgcataggcctgaaatacttctggaccaggatcggctccggcaccatgttccggttcgggagccatacatcgtataagtaccggctggccttgtataatgcttcagaaacaagggattcaaaatcttccgcctcataggtacatacgatatagctgcccttgggcatggtccgcatctccactccctgttcttctccccggctctctgtccctacaaaatagtcaaaatactgtggatcctcacatggcgtcaggatatccacatgctccctgccgctgctttggtcctccggcagctgtttccacaactctgtcagaagattgatcttcggctctcccagctctttcacagatgccttcttactttttcctgtaaaaacgatatccttgtctaatctctgtttccggatttccagcaccatctggtccaccgccaagggaaccccctcttgtactaatgtgtgatgtaaccctaaatccggtttcacaaaaatatccagggtcatatcacttttccggtattcatccggggtgacaccgtaagtttcccggaacgccctggtcagactgctgtggcttgaaaatccacattccagagccacatccagtattgtacgttccagattcctaagttctcttgctgcctttgcaagacgcctcagcctgagatattctttcacatttttgcggaccagcctttgaaacagcctctggtaataatacttggataaatgcgcctcctctgccaatgcatcaaccgttatctcttccccgcagtgttcctcaatatagtccagtgtagcctggactgcttcccatgcgtacattgtcttcctccttttgctgtgtttgataagactagtttatcggattctaaaacgtcatgcttgcccaggaatgccttgttggaacaactgcttaatactcagaggatctgtccggcggcgccgctgtgtccacagtcggccagctgttcgtccggaagtgtgcacactctgcgctccttttccaccagcctgctcacaaaatcagtggccggagccctcaaaagcacccccggctctgcgtactgttcaatcttcccctgatccatcaccaggacctttgtgcccagcttcagtgcttcggagatatcatgggttacgaacatgattgtgatccctgttttttcgtaaatctgccgaagttccgtctgcagctggccccttgtgatctcatccacagctccgaacggctcatccatcaggaggatatcaggggatgccgccaatgcccttgcgattcccactctctgttgctgtcctccggaaagctccgccgggtacctctccatcatatcctcatcaagtcccacgatgcccatccatttttctaccgctttttttgtgcgctgcttatcctttttgttgagcaggtctggaacataggagatattttcttccactgtcatatgcgggaacaggacacttccctggatcgcatagccaatgtttctccttaagctgatcatatccatctctgagatatcctgcccttccacaaagatcttgcctccatctggcaccacaaggccgttgaccatttttaagactgtggtctttccgcagccggaggacccgatgacagtcacgaactcacccctctcaactgtcaagtcaaagccttctatgacggtcttttccccatacactttttttatctgcctgaattcaattgccgtgttcatatggccctcctcactttaatagtcctttgctcttaagaaaatcttttgccgcttcctttggctctttctccttggtttccacctcataattgatttttgccatcacatcatcagacaggattccgtccagcttgtcaaatacctcttgtagttttggatgttgttccaatacttcatctctcaccacattcccacaggaataggaaggataaaagttcttatcgtcttttaagacaaccacatcggacacactcagctggccgtccgtggtgaaaatgttcatgacatcgatcttcttctggcccatggccttatatttcaggccgatatccatatccacggtctttttaaatttcatatcataggtatcacacagagcgtcatagccatcctcccgctcaaagaaatcgtactcagccccgaaggtcagccttgatgccacagccctcaaatccgaataagtcttcaggtcatatttctcggcaatctcccgccgcactgccagtccgtacgtgttattaaatccatacattccaagccactgcatttggcatttatcctcgtagccgttctttaactcagagaacatatcttccgtatacacgccgctctttttcagcaccatattccacccagttcccgtatactccggataaatgtcaaactctcccttttccattcccggctggatattggaagtgccgccgcccacaccctgggtcagttctgtatcaagccccgtctcctgctcaataaggatacagagcatttcacccagcacatactgttctgtcataggttttgtggcgatgtgtatggtatcttttttctgttgcccgaaaatagctccagccgtcagacagactgcaagcacaagggccaggatgagcaggattctgtttgtgcgctttgcctttttatctctggccttcatcctccgttccacaaatcccagaatgaaatccatgatcagagccaaaagcgcgatcagcaggcttcctgccatggtcatagccgcattgtttgtggtgatgcctctgtagatggccacacccagccctccggccccgataaaggatgcaatacctgtgagagcgatagtcatggtcaccatatttcggattcccgacatgatcaccggcatggcaaggggaagtttgatcttaaataagatctgtgccctggtgcttcccattcctttggccgcctccaggattccttcgtcaatatggctcatccctgtgtgggtattcctcaccatagggagcagcgcatagacagtcagagcaatcaccgcagtggcgtttccaatacccgaaaacgggatcagaaatcccaacatagagatcgatggtatggtatataggaaattgatcagtcccagcgcaggcttggcatatctttgatactcactgatcaggatacccacaatccctccaaacagtatggcgataaaaatagcgatcagggagatctccaaatgttccaaagctagactcaggaaaaatcctcttcgttgtgtaagtacggtccacatttgctgcagcataggttatccttccttcctttttattgcccctgccgggcactgttcagtgcacagcccgcagtgaaggcagtgttctgcctgtatctcaaacggcattccttctctgatgcactgctggggacatacttctttgcatattccgcagcctatacaggtatctgtgatcaggaagcccttttcctgtttcttctccgctcctatggtaaactgctccctgtaaatcggggtccggccaagatcaaaaaactccagccatccgtcctctatacagaaagcctctgaaatatagcggctgtctcccgggtagacatcattcatagatggattttcttcaaagattcggtcaacccacttcttttgatcctggagctttcttatcggcccggacagcctgaccatctgaaattctttgttcatccctgtaaccgccgtatatttctctgccatcagctgatggtaaaagtctttccctctttcagtgcaaaaatacagcttttcgtcctccacaatcataacatcaatgatgcgcacctgcggatgtccgtgttcatctaccgtggcaaacgccacatcttttacttctctcaatagtgctaggcagtctttcgctgtcatctgttcctcctcctgttcttttatttataacctgaaattatcataatcccggaatgtctgaacgtaaagtacgcacaaaaaagtaggataggcaccagaaagatacatagtttcttttggatactttaaaaaggagcggctaacttctgtaaattaaccgctcctttttattcctcaatcattatttctgctttaaatacattgatcgtgtccgcatccggacaacaaaacactgccgtcccctccggctgtccggggatggatcccccataccttaggatatccacatacggaaaagccacatgcatcgccataggacagaggtctcccctctccgtgtcaaaatcaaagctgtctccgatgttatgtccccgatggcatcctctctccccttttcgatcgatcaacgtgatcttaatcttcggccgtctcaaaattcagcacctccagatttttctcaatagggattcccttaaacttatccgccgtgtcctgatttaaaaggatcaactttcttacggcggacatggctcttttcacagacttctcaagcggcacctggttcagcacctgacttaccagaattgcagaaaagatatccccggttcccggaaaacgaaccggaacacagtcaaacgggagctttgagatgtcccctgtcttatcatcatagacaaacacaaaatctccgttctctgtcttaacacttgtgatgaccacagactttgccccaagacagtgcagtctttgaagcagttcctccgcctctccatctgtcacgatttccttatcctgatacagatccgctaaaaatgcagcttctgtcagattgggcacgatcacatccgcaaaggaacacagatctctcatatacccgatcgtccggctgtcgatgccgttataaagatttccttcatcccccatgatcggatccacaaagatccatgttccgctctttttctgctcccttaaatatccgcagatcagctttccctgctcctctgagacaatgaagcctgtacacacagcatcaaaggagaagtccagctcctcccagactttcaatgtctgcctcatatagtctgttgtctccaagatctcaaatttaccgtaatccagcgtattggacaccagtgcggtgggaaggctgtacagattcagcccggcgtgtgtcatgaccggaagcattgcggacagtgccaccttgccgtacccagccatatcgttgattaaaagtatttgatccttcatgctattcctcggctttcatagtttcatattcttctgcaaaaccttgatcaaccgtccataatcgatcggttttgaaacatggtcgttcataccggcggccagcgccttggccatgtcttccgcaaatgcattggcggtcagcgcgatcacaggaatactccccgactgaggatggccgctgttcctgatctcttttgtggctgcataaccgtccatgaccggcatctgcagatccataagcactgcctggtaatatcccggctcggaatcaacaaacatttccaaagcctgtttcccattttctgctttatccacaagaaaacccgcttccgtaagaatcgtctccgcgatctccatattcagctgattgtcctctaccagtaaaagctgttttcccttcatcagctgcagggttctgactccttcctctgtaccgtcatatgtaggaaagcctgccatcctgtgctccgcaacctggtccggatcggcgatcttaagattcagtgttacaataaagcggctgccctcactctttttactctccacttgaatatttccattcatggcggtcacgatcccctgggcgatggacatgccgagtccggttccctgcacattgcgggctttcgagtcgtctgccctggaaaacggcacaaaaatgtaattcagaaaatcctcatccatgccgatcccgttatcctccacggtaaatacaaagctggcaaatcccggaatacggcctgaaacttcctggactgtggcagtgactctgccgcctttcggagtatacttgacagcgtttgtaatgaggttgatcatcacctgcctaagccttcccgcatctcccaccaggtccacatgaacaagatcctgcgtcttaaacaaaagttcatgctccttcttcagtgcctcgggacgtgtgatcgaattgatgtccgtgatcagttccctcatacagaacggtgcctcggtcagttcgatcttgcctttttcgatctttgacatatccagaatctcatcaatcagatccagcaggtggctgctggacatatcgatctttgcaagacagtcctttaccttttccggttcatcgaccctggatgcggcaatggaagacattccgatgatggcattcatcggcgtccgtatatcgtgggacatctgggcaagaaaactgctccctctccttttcatggatcaaagacatgtatgctgatttgagctgtttatagctgtcactgccctttagataatcttccagatcctttcggatgctgaaagactggaaggtcccctccaaaaggtctacgtaaaagacagagtgataaaaagaggaaagacctttgatgatattccttgactcaaagtagagctttttctgtttctcttcttccatttcctccagcttttgttcattgatgttcatattggcaaacacaacctttgtcaccctgccgtctctcatctccgcaatactaaaccgggagcgcacccagcaagtccggtccggatacaatctgcggaagtccacatcatagactggatactctgcagacaatgtctgtctgagaaactcaggattcccggctctatacatcttctcctggtcgtcctcatggacgtgctcacgtatgaacttctcataatacactttaaggcttcccttcggaaattctttacccctgtagataaaatcttcctgccagatagcctcctctatgtcattttccaggtcgaacagatagatggaataataacactcgcagagattggacagcacattttctctgagctgggactcccttttatcgtcaatacagcgcatagtcatcaaaatatgctcttcccggttctgacgaatgcacgcagaataataactataataatgaagatcaccctgatcatcggcaacccttaaaactccctccagataattcttgttctgataactgtccttgtcaaaaatctggtccagaagctcccggtcctccagaggcatcttctgcttcatcctgctctgaaaatccccgaacggaccgtgacgacgaagccttagcaggtctttggatccatgaatacagctgtattctgatctcccaagatccgtgctgatgaccagctgataaatctgcgacaccgcaacctgggcggtcctggcgttgatcctcttttccatctctttgtcctgctcgtcaaaggccacgatcacccatggaaattccttagaataacctgcggacggcacgatcttgatccttctccagcccccggtcctgctccggtagtactcctcgatctgcggctcaccttcatcaatctgtttttttatgtaatcacacttgacgatatcagaaagaatcttttcatccctgtaggagacctcattggcagcataacagcagaagaattcctcatagtctgaaaacatctgcgtaaagatccggaaagagtcagacattttaatcgtcttaaacgtccggttctgcacattgcataaaaaaatgccggtgtagctgtcgcttaggctctgaatgactgcatcatactcctgcttgagcataacggtattggtgatattctggtggtatcccctaagacacaccccctctttgtagttccaatcccggactcccccgcagcgcacaaaaatgcgtccccactttggatgctcccacggatactgcacttctgcccgttcatccttgatcattttttccactccggactgaatgatcgggtaatactcatcctcaatgcggtcataccatacctgataacatcgttccggtgtcggctccgcttcaaatcctaacagctcaagcatagagctgtcggcgtacattctaggctctcgatcatcatctaattcaattacccacagccccgtctgtgcttcgcgcagaatttcctgcatcttctgcgtgtccctgaaatggtcaagcatatatttttcctttcctgtatgagatcggtcttgttatagtccagtataacatgattttcattcatttataagttctacgcccaaaaaccgcacaagatccattgcctgccacggactgatctttaatccccgcagttcccggaaggtatcggatatcatgattccctcaatgttgcagtccgacagatccatgccctccagctttgtcttaaatagatctgctttggacagattcactttctcaaactgcatttttttaaactttacttccgcaaagaatgcttcgctgaaatcacaccccttgagcctgcagttgtcccagagtgtcccttcatagttggcgtaatgaaaacacccttcctcaaccagggttttgcggaaggtactctggctgaaatcccctccgtctcccttacaccccgatatttccgtgtctttaaaataacaggactgaaatctgcagttggagaaatcacaatttaagaatgttacatgataaaacatagaaccactgagatcacatgcctcaaacctgcatttcttaaaaaccacatggtccagttcaatcttcagaggactgtcaatgcacaggacttccccttcataatgtttatgtaccagcggttcttcctcctccgctgctcttctcatatcctctttgagcattctgcccccctaacgtaccggttcgtaatctacttctgattcttcttttgtcgcctccagcttaaatatcacgggccgcagtccgtcgttgcagcttacgattgccacgccgggcttcctgatccagtccccgtaataaaacagttcctccccagctccgtgcgacaacgcaaacacatactggtatatagctttccacgcttcgtcgcacagcccttcgggttttgcataatctgcataaaatacctggccctccgtcatcataggacaggcctttagaccttccacgccgtattctttgaccagatcctcattgaacattgtccttaataccgtgatcttaacttttttcatcttaaaacctccgatccttttgaaacagttacatccggcgttctttttctgccgccacaatcaacatcattgggcgacgcatctcatcgtgcatgcccggcagatccatcatatcctcctgcggcttaggctcgatgatatgtctcagcacaaaaccgttcctgaggagtgtattcaggtaggttgtcagtgttctgtggtattttaccacctgctccccaaggaagacagcatccctttttccctcatagaaataccggtctacagggaaatgcagaatcttcccctcctcatcataataccagtcctgggtcccatatgcggtaaataccggatgttccgctgaaaacacaaactgcccgcccggtgctgtccactggctgattttttctgccagggattcaaagtctttcacatagtgaaatgccagagaacttaagaccacatcaaatgattcctttggaaaatccaaatcttccatggcactcctttggtactcaatctttttatgtccatttttttcttgggctgtctttaacatcttttcggagatatcaatgcccagcacagatttcgcaccgtgttcagccgcataaatgcagtgccatccataaccgcatcccagatccaggactctttttccggaaaaatcaggcaggaccttttgaagctcagaccattctccggctccgccaagccccttctttgaccggtccatctcgctgtatttctggtaaaatacttcttcgtcatacttattttctttcatgatcttctaaacacctccataaccgcatgacctgctccactgcagccgccatatttttctttgcattttcaggctccattgcctcctccatggatgagacttctcttaaaatagggaaaaaggcatcgatcccgtgccgattgcatgcaccagcatccttggccacacagcctgcaaaagcgatcacaggcctgccatatcgttttgccatctctgccacacctgaaggagccttccccattgcagtctggccatccagtctcccttctcctgtgatgaccagatccgctctttggacatattgttccagtccagtctcttttagtacaatgttgatcccgggttccaagactgcattggtaaatgtgagaaatgcaaatcccattcctccggcggccccagtcccaggctgcatgggcttcgctttggaaaacacttcccctgccagctgggcataatgtccaagccactggtccatgtctttgatcattgacggatccgcacccttttgaggcccgaacacagcactgcacccattatccccgcacagaggattggtcacgtcacaggcgatatggaattcacactcctttagctcaggcatcacctgggtttcagtgatagactcaagctctgacagtccctttgccccagacgggacctgttctccccggccgtttaggcacccgtaacccaatgcctgcagcatgccgattcctccgtcattggtagcgctgcccccaatgccgacaatgaatcgtctacaccctttggagacagcatccctgatcacttcacctacgccatatgttgtcgtgtacagaggatttctctcaggctcaggaaccaaggtgatccctgccgctccagacatctcaatgacagccgctccggattcctctatgatcccatagccgcactccacaggctgcccgagaggccccgtgactgtaatgttctccattctgccacccatcccgcagacaagagcttccacagttccttcccctccgtccgcaaggggacgcacccatacctctgcctccgggtatactttaaggatcccatccaatacggcgtttcccgcctgcatggaattaaggctcccttttaacgaatcaactgccaccgctattttcatttgtgcctccctcttgttttgatcagtgtactttctagtatacggcatttggggcaaagaaaaaacacccctcaagcagatttctatcctgaggagtgcctgtatctttatttttctaattcattcaatattgtgtcttctaagtccttctgtgtcaatccaaattctttttgcagatactctggggatcccacttgtccaaaccggtcttttacgccaatccgttttaatggtgcactgatctgatgttctgccattacttcagcaacggcacttccaagtccgccataaatagaatgattttcaaacgtcactatgagatcttttccttctgcttccttgatgatcaatgtttcatctaaaggtttgatggtaaacatatcaacaacctctatattaattccctgtctttccaatgcttccgcacagtccaaagcctctgacacaagctgtcctgctgtaatcaaaaggacattcccgccccttgttaggatatttcctttaccgagtgtaaacaccgaacctttctcatagacatttctcactgctttccggttccccctgacatagtggattccgtccagtcctgcgaattcttttaagatccattccatctgcacatcgtcagccgcatcacagataatggcaccagggatctcccgcatgagagccacatcttcccatgtggtatgggtccctccgttgggtccgacgcagaatcccgggtccgatccgtaaatattcaccgtattccctgcatatgcccctgacagatatagttggtcaaaaattcttcttgtggcaaaagggccgaaggtatgaagaaacggtttaaaccctgccgccgataaccccgctgccaccccggccatattggcctccgcgattccacactgtacaaagcggtccggattggttgtttttagctttgtaaaaccactggctccgcctaagtcagcctccagggctacaaccttgtcatcgcgagacatcatctcccgtagagtttcaacaacacagcttctcagttctctgccctttgcttttctgtcatctgtcaaccggaacatagatcagaccctccttttatcattctctctaattgttcgatggcttcatgatttgctcttatgatctcatcattgtcaaacttgaccgaatgatttccagctaactgctcaaaaaagggaaccccttctcctttgacggaatccaggataatacatactgcccggtcttctacttctttggcatttgagaccgcatggtcgatctgttcttcatcgttccctttgacagtttctacatgaaaaccaaagctggtcattttatctgcaatcgaaaatggattcatgacctcttttgtcgacccgtccagctgtctcttattctcatcaatgataacaatacaatgatttaacttatagtgagccagatattgaaacgcttcccagcattggccttcgtttaattccccgtctcccacaatcagatagacataccggccgctgttgctcatcttaaatccagtggcaagtcccgccgccacagaggttccctgccccaaagaccccgtcgtcatatcgacgccgggagtcttcaaccggtctggatgagacggcagcttcgtgccgccgtcatttaatgtatccagccagtttcgatcaaagtatcccttttcagccagtgcagagtatagtgcaggtccggcgtgtccctttgacagcaccagcatatcccgctcctcccatgccggattctgaggatcgatcttcatctgctttccatataggacactcaggagttctacgattgataaagagcctcctatatgtccatatccgcgtttttccagcatctgcagaatgttttttctgatcctggccgaaaacaccttcagctcttttcgctgcttttcttccatttttgtacgtcctcccgctatacagttattgaaatttcgcttttaatttttcctctaattcttctttgtccatgatgttatccatgatgatcacttccggcaggcctttaacaaactcttccaagtcctttcccacaacaaacaggtctgccgccccttctgtggcatccgaaagcgaagagtgactgacagacacgcctgaaatccccagactttttaacgccttttccacgttcatgcggaccagcatactggaacctaatcctgaaccacagcaacacataattgattgaatcataatagaacctcctttatatttaagctttcttttttggtgcgatcaagtgataggcaatcgggattaaatacaatacgatgcacacgataaataatcctccgccttttacaaattgtgcaatgtttccgagtatgattcctgccacagagaagtctgcatctgagaacgtacagttcgcaaaattcaagctgcccatgacaggcatacagatggccggtaaaaatgtgatcaaaaggccgtgtaagaaagaacctaccaggcagcccttcaatccgccctcggcattggcaaatactccggcggtagcaccgcagaagaaatgcgggatcacgcctggcaggatcagcgctaccgggatcagtgcctggttgatggctcccaggataaataagcccgcgatgcctcccacaaaagataccagaaaaccgatcaatacagcgttaggtgcataagggaacacaaccggacagtcaagcgcaggttttgcgtttggtacaatcttttcagcaattcccctgaaagcaggaacgatctcgccaatgatcagacgcacgccgcttaaaatgatataaacaccgccggcaaagtttagaccctttgtgatcgcccagacaagccagtgggtttgtgtctcgccctggaaaaatgccgagattgttgcatcgctcataccgtcttttacgacaaccgccacaaaggtcacaatgataaaaaacactaccatagtaaggccgatggctacagttgtatcccgtagaaacgaaacccgtttagggaaattaaattcctctgtggatttgctttttcctttaaagatttttccgatctgcgcggagaaccaatatccaactccgccgaaatggccgaatcccagctcgtctgttcctgtaatcttcgacatggtaggctggcagattgccggggataacaccatgatgagccctaaaaccaatccaccgccgatccagagcactgcgccgcttaaatttcctacatttaagatcaccgccagcatgcaggccatataaagagtgtggtgtcctgtcagaaatatgtagtttaacctggagaatctggccagaacaatattcgcgatcataccgatacacatgatataggctgtatcgcttgcaaacttctccaggcccagtgacacgatagcctcgttgtttggcacaactccctgcatactaaatgcataattaaaaattgtgccaaaatcattcagggaaccagtctgcaaaaagctggaacccgctgtcaatacaaggaaccccacgatagtttttacggttccttttacgacttcttcaatcggttttttctgcaggatcaaaccaaagagagaaatcagacctaccaaaattgcaggtgtcgacaaaatgttgataataaaatccataaataatcctcctttttttctatagatttctatttagttatcatcagaagcctggataaacaaatcatatatctcttgctctgacgtggcgcccaaaactttttttacactttcaggatcttcaaacagctgtgacatggcctgcagcacttccatatgggactctgaatctgttgcggccaatgtgaccatgactcttacgtcatctccattttctttgaactttatgggttcacgcagaagagtaactgcgatctgcctttttaaaactccctgatccgtacttccgtgtaccaatgccaggttttcacacagaacataataaggacccagcctctctgtatttttgatgatctcgtcaatatatctggactcgcaatatcccccgtccacaagcggctgcactgctacatgaatcgcttcccgccaatccttcactctttcaatgatctgaatattctcaagtttcagcatgttatatatttctttcataagttcactcctctccctgcattagttcctttatcattatttctacagcttcggtcttttcgcacttccacagcttttctgtattcttgtcttctttaaagatcgtcataatatcatttaataatttaatatggctcacctgatcttgtgccgagagaaccagcatgatctttgctcttctctcacctccgtcccgcgtcttaaataccaccggcttttttaagaccgtacacgaaattccaagcatataagaaccatcctctatctctgagtgaagcaatgctacttcttctgtgataaacatatacggaccatattttattgtcttttcaatcatatgttcaatatacgactgtccgatataaccctcctccaataaacttctggctgccgcccagaccgcctctttccagtccatggattctcttatgatctgaatatgccgcaaatcaagcgcctggcaaatgctctttccgtattcattttgctttgtatacgctttcaacgaagcatcagaaaaatattcgatcagttcttctttaaattcttttaatttactctctgtcatatattttttggccagagccgtgatctgcattacattcatgacattctgattttcatatttcatacattttttcaggatgctgatccggtcactgtctgagaggatcggatgtacaatgattaagttttcttcgttctctataacgatcgtggaaatgactacattgtagtcatgatcttcctcgtaatctgacaaggaaataatatccaccgtctgaatacttggtacaagggtatagatttccttccggatcatattggccgtacttaatccgttcgggcatacaaccagaacttttagcttttgctcctcttttctctctcctgaggatatgtaggcgccaaaatgcagcgtgatatatgcgatctcaccgtccggaatgggtacgcctatttccttttctaaagatttggcggcatttctggtaatctcaaacaaatctccgtattcgtttttaatgtcatccagcatcggattgcccagctgtactccataccgataacggtagagggaagtcttaagatgagcggagacagcctggatcaattcctcctctttttcaaacgtcacacaggcgattcttgaaaaagaccgtactaaaaccttcgccagcctgagcacctcctggcccgtatccctctgcataaaatctgaggaaaggctttgggttctggacccaagcagatgcagggccaggtataacttttcactttcctcaaattcaggaaaatatttaaggactaattgaaactcctttgtgttcttgatctcctgctcttcattttctgaaaattcaactgtctcagagtgattttttattgtggaaaaaaatgcggcaatggagtataaaatcccggtcacgtattgagcgtggagttcctcttcaagtttcttcagtcttccgaaaatatcctctgctttctcttcctccggtaaaatcagcgcaccttttttatacagatcagccagcgaattaaaaaacagaaaaaatacactcctctttgtgatcagatcacccctgatccgatagccttttccgttttcatagaaaagtttcagctggaatttggcaagctcctttgtcgcttctttcagatcccggatcgttgtattcctgctgacctggcacatctcaatgaagtcgtcgatgtgcagctgcctgcttctctgtaaaacagaacagataatgatcctcactctttctgtgggcagaaatgtatacgcaagtttgggcgggatctcttttaagttcctgcggatctgttccttttgatccttcgcaatgaaaattccctttttgcgctcgatctctaacaatggaagtttctgtgcctccagccattcatttattttttgaatgtcataataaacacttctcttagacaatcccttttcatccgctatctgtgccaccgatacatactcgtccgtatagagtaactgctctaatatttcataacatctcatgtctaagttatatatgattgccatctgtctctccttccctgtctttagaatactctatcgttttgcagacagtaaagtccaagaaatgtaccaagcagacttgcttcttacacaatttgcaccatccaaaaattccgtttctaaacagttttctgtgcaaaaatcagaccccaatgcatagtgcacgcaggttttttttgttccatagggaagtttgtagaacttttctatggaacaaaaaaaccggttcataaagaaccggccagtctgttattcattatttttgattaacttatcaatttagtcattcagtatttttgtcagatcttcaatggatgcatccatttttacggatacctcttccatcgtcataccggaagcaagaaaacgattgatgaccattttcatttcttctccaacctcgatcatatgtccatctaagtcataaaacctgacaacacgctgtccccagctgtgttccaccacatcgcccacatactcaatatcagggtactgtttcagcttttgcaaaaagccatcgaagtcttgttcctcaaaacataattccatgtcgttggatttcttcagtatgtcttctttttttatattgacaagccagtcaaactcctgctgaagcgacaaaccgcaggtaaacgatatgtttattccatagtcctgatctaactctaaaccaaacagatcttcataaaactttcttgcggcattgatgtccgccactgacatgacactgcacatatatttcatataaaaccttcctttccaatcgttattttcgtcttttttcagatatttcttcttcctgaaaaaacatatttttcataacgtatagctcctttcaaaagttaaagtacttaacgcctcttgtgtacaaaacaccatttgatgagtgggatatttgaattttaccaaagcccaaaaagcctcacgggatatctctccctttacaaaactttccttatatataatcaaatatgctttgaattgcatctgttatctcaatgatgtctgtctttgagatcctgcctgtctttgaaaaacctctgacattgagatctatcaaagctaatttttcgcactgaacatatccctctgtactatctgttctgattctaatgtgaagagggctggccgaactatcctgaaaaacagggcagccaataatttctccggtctgattaaaaaagtccttactggtgacaagtacgggactcttgattctttctattttgactatgtcaccctgatgtaccgtttctttcatcaccaaacctctcttcctacaggttcgccccagttatactcgcccaccaaattcagatttccattaaactctgctgctctttcctccaatgtcttatgcctgaatggtttcactaatgtaatcatgccgttcactacttttacttctaattcatcatcaatctcaacatctgcctcccgcaaaatatcttttgaaatgcgtattccctggctatttccccatgctttcacttgtactttcataaaaacacctccatccgccaatgtatatacttagtatatactgttatcataaatttatcaactcataagcgtcatgatacacaaaaccaaagtatgtgcatccccatataatcttccttatggaatttagcgttacatgcagaatctaattttttactcaaccttttttctaaattttattgacaaattatgataatagcgttatcttaataataagaaatgggttttcaccacacttattgttgtggcttgctcgtttctttttttattgccaaaatatcatacaaatactttctcccattcgccgcatgatttacaagtaaccttgcatgaaaaatattatatcgcactagtacttcattttcatatgcaggtaacgcaaaacgtacatcatatctaaaccatccgttcttcgcattttttgcatgttttttcttcctatttttctcaaaaaaaggattagctgcgatctgaattaactcaggaatggctattgctgcatttgctttcgcctttgcattagtgcctattagggctttcctgctttctgactctgtaaattcttcgggtagatcattgcctatatagattatctcagcgctttcctctattttataacattttccaacatatctttgaagatatattttcacatcttcccagacgatattccttttccctttaaaacgaatatcgttgataagaacaattttatttccatccatatctaccataatttttatatttgactcctcgaacaaatgattttttcctcctttatttctattttatggaaatattatactctgtcccggagagatttacaaataaaaagaaagtttaaagaatcgtgcaaaaattatcttggatgagtccagttgaatataggctcagccaagtagcatagaaatagcgaagcagtagagataccacttcgctataaagtctaacttatcggggtcacattcccagaagaatcttttttctcatctattcaatttctatctgaccaccaaaggcacaacctgtcctttcacaacatcaatcagtccccggtccgtaagcttcaaagccgggcttaccggaagcccaagggtacaaagtgacatgatcgggttataatgccggtatcccagttcctcaaggctctctctgacccggctgagtttcacgccgatttcgtctgccggaagttcagataaaatcccgcacaccggaagcggcagttctgccttgatctgtccgccttcggcagtgcagattcccccgttttgcttcaaaacccagcgtgccgcagtgagcatatcctccggatcagcccctatgaccaaaaggttatggtggtcatgaaaataggttgtagctgcggctccccgcatcaagcagtctccgctgacaaatccataaccgatgttcccgtttttcccatggcgttccagcacggctgccagcatgcagccgctgtccttccactgaaaccgtccatcttttacctgcatagaaaccgtacgttcctgcgtctgtgtacgcccgtcatggacctctatgacacgaatctttacctcaccgttttctatattacagcggggttccagttgttctggagaaatgtcatctatgtgaatgctgcggtaaaaatgaccaggaaaacggtatgtctctgtatgttccacggcatccccagagtgataaatctgcctgccgtccttaaatacatactccggctcaaaggaagcgcagtcttttgccctcacaagctgaaaatctgcctttcttcccggggccagcgcctccctgtccctgagattcatccttcttgctggagtaaaggaggcacagtagaccgcttcatttaacggaaatcccatagccacagcccttcttaccacataattgagctgtccctgctctttgagcttatctgccattgtgtcatccgtcacaaaacaacagtgctcatatagattgtgttcctttatatagtctataatttctggcctgagcatcttctcctgcagttccacaaacatcccattttcaaaacgctctttaatttcctgaagattatgctccgtgtgatccccgttgatcccctggtaaagaaacttcgccagatccagtccgaccaaagacgggcagtgcccttcaatgacagcctgtggatcctcttcctccagataatcgagaaacttcgtgatctcaagctcatctcccttgatgatctgacggtagttcatcacttctcccacacagacaacaccgtcttcctgcatgagctgcttcatctggtcaagcccgatcacccctcctgttgtctccagtgattcattggtggaaggaacactgcttggaataccataatagatatctaccggggaatcctttgcaccgttgatcatttcatgaattccttccatgcccatgacattggcgatctcgtggggctctgacaccaaggtggtaacgccgcactccgccgcccgatttccaaaggaaaccggggtcatcatagagctttctatgtgcatgtggatatcaataaacccggggagcatcctgtacccgtttccatccagaacacacctggcctcaagttcgtgtttctgctccatatccacataatatatttttgatcctttaatatacacatccgcacgtacaaactgcttaaggtatgaattaaagatttccgtatccgcaacaagcaaatcaaccttttccataacagcacccctcttctatagtatggaataaaaatacagcaggcatactgccactaagatccacataaccggacgtatttccttggcttttcctgatgtcagcttcatcacaacataggtcggcagtgccgcacagataccattggcgatgttgtttccaaagatggtaaatgcgatacaaacaaatgccgggaatgcttctgtgatgtcatcaaaatgaatatttttcatagctcccagcatgttgataccaatatacatgagcaccggcgctgttgccgcagacgggatcatcagcgcgatcggcgccagaaacagtgacaggccaaaaaatacggaagtaaatacaaccgtcagcccggttttccctcctgcttccacacccgcagaggactccagatatgtggtcatacttggcatgccaaacagcgcgccaaagctggtggccactgcatccaccttaaaacacttgtcaatgcccggaagatctccgttttcatccaagtaaccggctttggcacccactccgaggaccgttccgaaggtggagaagaaatccggcacaaacaaagcgatcaaaaacggaatatatgcaaaatccaatgctcccaggaaatccaccctcataaactggccgccaatgtttgccggcatggtaaacaggctgtccggcaggacggttacaccaaatggaattccaacgatggtagtgagcacaatggccaggatcatatcccccggcacttttcttgattttaaaatcaacagaataataaagccaaggaccgctacgatgacctcaggtgatttgagattcccaaaccccaaagagttctttgcctgattggcaatgatcagcccgcagctctttgccccaagcaacgcaataaacaggccgataccggcgcttaccgcatgctttaagctaaccggaatcactttgacaactgcctccctgagtcctaaaaaggaaatcgcaataaacagcacaccactaaagaaaatgacaccggctgtcacagatggggcgatgccgtcatttgcgatcattgccgctacaattcctacacttccaagccccggcgccagcgcaaacggcctgttggtataaaaggccatagcacaagtggtcagtatcaccaaaaggatcaataccgtaaacatcacatgtttttcaagacctgcagtagccagcatgttcggaaccgtggccagcacataggccatcgttacaaaagtcgtcagccccgcaagcagctccgtctttacatctgtatggtaatctgataattgaaaacgtttctctaaccattgtttcatagtttttcactccttttcctatgtaaatccttgctttctcacgtctttcattgtatgctaaccgtaactattcgtctaattcatcttggttataaaatgtattcctcatcagaataccagtagatgaactgattcatatggcttatgtctgccagatatggagtttgttatgaatatccatgaactaaactatgcactatgtatagcgaaacatcaaaatttaacaaaagcggcacgagagcttttcatctctcagcccactttgagcaagcacctaaagaagctggagcgggaactgggtataaaactgtttgcccgcatagataactgttatatccctacctatgccggctcccgttatcttgagtatgcctcccggatgctcgcgctgcagcaggactgggaaaaggaactttttgaactggcttccttgaatgacggggaactccatgtggcgattccgctgatgagaagttcctgtatggttccctacattcttcccacctttcatgaaaagcatccgaatatcagagtgcatatattggaagaaacctatgcgatccaggaatgtctgttaaaagatacctccattgattttgccatttttaatgaaacaaccgaaaaccctaaactaacctacgaatttctgggaaaggaaccgatcctgctggctgtttctccagagcatcccctggcagccgttgacggaaccagaaaagaaaccgtttatcctcctgtggactgggaggcgcttaaaaaggaaaagtttattctccactttcctgaacagaacaccggagcaatcacagaacgccttttgaacaaacatcagattactcccaaggtccccttttatacccgcaatacacaggccgcactccttctgatgatgaaaaatcagggtgtctgctttgcccccgaaacctatatccgcagcatgtcctttgagacacctccagtatgcttttctctcggggatgaagacgcctatacctccactgtattagcatatcggaaaggagcatacctgacttcttacgctgaagacttcatacaactggcaaaggaatactttcctgtggaataaaaaaatatctccagtcatatcatattggctggagatattttccgcaaatccatctttattttattctcaccgtcttcatcttcgtataagcgctgtagacccttttgtcgccctatagacttgatagcctttggcttctttcaccttcttccatgacaatttcacagtcttatatgtcgtagaggattttacgtttggtttcacaggcgcaagcttcggaagattctccgttctcacgacatgaccacagtctttacaggtatacctcttcagtccaatctgggtataggtcggtctctttattacgacacccttgttttccttatgagtcgcatagccgttcttttttcgtttgtcagttaccggacagtttgccactgcacaattgtgccagtgatgatccgcatccgctgcccatgacgtatgctgctggcataatcggtgaggcttgaagaaacagaagaattgacatcctcggcaaacacctttaaattatactttactccttcggtcagatgctccggcagcgtaatctcaaattcacccgcggatgagtcccgaacttttccataggagacaacctcaccttttccttcctttttactcttcatcgtaattactttaatttcaactgatttcttgataaaatgaaatcatacgggatgaggtctttgaaaaaaattctcatcatttcttagaaaattcaaaaaagtttgaggttttttggccagcagaaacttttagacaaaacaaataattccatcacccaccacaataagaattggaggttcagatgactaatacgaacacgtcagaagatttactctttttaaatgaaaaatttgcaccggcggcgcttccggaaatctgtgcgccgcggaatgaattgttagaactctttcactgtgcagcaaaggatcactttatctatgtaggagctcctgctggaagcggaaagacagtttctgcccgcctctggctcaatgcctgcggacgaaaaaccatctggatcgggctggaccagtatgatgattctccttccgttttctacaaacttctgtccacagggcttttttctatgcagccggaaaaccgcaatatgaaggaaatactggaaagctcctctttttccgcatcccctgtagagcataccatacgtctcctgtctgaatttctctgggatgatgagcgctacgcactaattctggatgacatgcatctgctccaaaacggagaaatattcaaatctctgcctgccatcataaagcggcttccccgttcttttgtgacactgattctttcccgcagccgactcccggaggaatttaaacctctcatcaaaaaccctaagcaggatatcatcactgccagggaactgcgattttcagaacaggagatcgcatgctactttaacagcctgggccgttccctctcacccaaggaatcaaagtctgcatacatggctaccgaaggctgggctatcggagtaaacgctgtggccaaatccggacagataaagtcaggcagcggcggatatatttttgcccaattttttgaagaacatctctggagcaactgggacgagtcactgcgtgatttctgcctgcggacctgtattgtggatgagtttgatccggttctggccggtaagctttcaggacgggataattcccaggagatcatggaagagttgagccgtaccaatacatttttaagccgcctgcacgaaaacatttatcgataccatcatttagtcttagattatctcagggcaaaactggaatcgtctaaactagacgcccgtaagctggacaagatagcagccaattattacaaggagcaaaaagattactcccgtgctctgcgtttttggctggacagcggtgactataagggaatcgatacatttttgtacttattcctctttgaaaataaccggggtgttatcgcagattacgcagattttttgaggaccttttttgtgaaggatttccctaaaaaagccttttctgtatttccgcctctgcacattctctgcgcctggtacacgtatctcaccagccagagggaagaatttgagatgcacatggatgcggtctatcgcaatctgccccgcatcgctctggcagattcccggttcgtggaatatgcgatcttagcctacagcgtggatcaccgatccagtatactgacgaaaataaaaaagttccggactttcggacggtatgtaaaaaagtttactccggaaggtcttgccaccaacattgcctcatttacacacaatcttccctatatgcaccggtgcaatctggattattcagaccttgccctggaggaagacagcatggagcagctggaaggtaatttttctctgctcctcggtgaggaatggcgatacatcaaacccggtattcccgcctgttttgcctatgaacgcaataagctttcagaagcactctccggtattaccagggccattgatgctatgatcccggaaaataaagtggaaggccgcatttgtgtgatgatcatgcaccataccatgttgtggcagatgaaacgccaggatgaagcggacacggttcttgaagcactttcctcccttgtggaatcagaagcccagtttttcattccgaacctgaaaggctacaagaccaagcttgccctctttgactgtgacacggctgcagccaggacctggctggatgagtattttgtcattgagacacagcatgtggagctgttccgggtattccagcatttcgttacagcccgcgcttatatggtacttggcaatacagataaggctctttcctacctgctcatgctgaagcagttcggccaggatttcaatcgtcctttggatgcaggtgaggctggtaccctgctggcgtccctctactgggcgacaggcagaaaaaaagaggccttgtcagccctggaagatgcactggagacactggaaccttatggatttatcagaatcgcagctgatgaaggcgcatctgttctgccagttttgaaacgcctggagaaaaaccttgcacaggagaactaccaagggaaactaaagaggacatatgtccacgaggtaactctggccgcccactctttttccaagctgcacaagggcgtggcagatgctcttgttcgaaaagataagcccgtccggctgtcaaagcagcagacctatatgctgaccctgttatctcaaggttacagaaatgcggaaatagcggaaataaccgggctaaagattccaaccatcaaaagccatacttccatagcttataaaaaactgggcgtaaacaatgcaatggatgctgtgctgaaagcccgggaattaggatttattgactgagacaactatgtaaggaaagaaatatcgcaataaataatttggctcttggtttaaaaatgacggtatctaaactactagatattccggaaatgaaagagactctttttgttgatgaataaattatttttagccaagcttatatcaatgtcaagggttttttcctatgccatcggctccagttaaattcactgtaaggatggaataaagaaaccgaacaacatggagaaatagaagttgaggaatctcctataaactcataaaaccacagccaattcataaaattggctgtggtttcgaatttgtcatagttactaacatcccagtctctttaacagacactgcatttttctgatcccctctttctgggacacaatgatctcatccagcagagggaccagctcagggcaaaggcaaaaccgcagtgcattttctgacatgcgcacagcccctctgtgatgtggaatcatctctcgcataaaattgcagtcgatgctgttatctgtacatgctgatttcatttcacaaaacatttcattgataatgcattgattttcatctgcatagcagtttatatccctggaacaattaatacaagactcacatcttggcagtgctttcgtcatattttgaatgcttttctcctgggatgaaataatatttaatgcgatattctgtaatgggatattggtagtatagcaaagaaggttttttgacatctcaatcgcagcacagtgatgcgggatcatctgcatgataaagctgcctgaaatactgtcagtcagttccacagaagtcatattttcaatcatctcgtttagtatacactcatatttcttcacataatctctggtattattgcttaaacggcacatatccatatatttttcacctcttattattatatgataagatgctccgttttgtgtaactgagatgctgtattacgttttctgcagtctaatattt

SEQ ID NO: 28 - DNA, 32974 bp, Anaerostipes rhamnosivorans
gctgtgtttcatgtcttatgaggtatgtttttagtatagcaggattaccgtaggaaacaatggatagaaaataaacaattctaaatgaaatataaacaaatcttacagaattcttgtgtttctggagaaaaagtaaaggttgatgtaaatgaaatgataatatgttgattaaaattaggattatctattgaaaatatcaccaagatatactaatatataatcattatgtaaccaacgactttctcatgaaaggagtcttctttatgtcagacgcaaaaggaaaactgtttgaaactagtgaaaaattcccgcagaccgaatactggaacgattcttgtgcggtaaaagaactggagtatgccatcgaccgtggagcaaccggggctaccaccaatcctgtgatcgtaggaaatgtattaaatcaggagatgaatctctgggaagatactcttataaagtggatcgatgaaatgccggacgcaacagaggaggaggttgcatggcgcctgatcgaacagatggcagtgcgcggagccaaacttcttaatccggtctatgaaaagacaaatcataaaaaaggaaaaatctccatccagaccaacgcaaaattatacagaaatgcagacgcaatggcagaacaagcaatcggattcggggacctggcaccgaatatcatggttaaaatgccgacttctgcagcgggaatcaaggcatttgaggaagctaccttcgcaggtatcagtatcaacgctaccgtatctttcactgtggcacaggccatagcagtggcagaggcagtagagcgcggattgaaacggagagaagaagcgggactttctaacgagaatataacaccggtgtgcaccatcatggtgggacgcacggatgactgggtaaaagaagcagtgaaacgggacaatctgtgcctggatccgtgcgcattagagtatgcgggagttgcagcattcaagaatgcatataaaatctatcaggaacgcggatataagacaagacttttggccgctgcatacaggaattatttccactggtcagagtttatcggtggtgacgtggtgctcaccatcacccagccttggcaggagaagatcaacggaagcgacgtggaagtaaaagagcgtatggaccgcccggttccggaaaaatatctaaatgaactgaagaagatccctgattttattatggcatatgaggaagacggcctgaaaccagaagaatttgtacactacggagcctttgtaaagaccattaaccagttcctgggagggtatgaaagccttctcggagtgatcagaaaactgatggttggagaaccaattagaaaataaaatacatagacggcaaaacagcaggtattctatggatcatacctgctgttttactgtttcattggttcattagatgtttcatcgttctgcatgtgtacctcacattctcttcttatgcgttatatagtaatgaccgccgttcattgctgtgattccggcgttgatgacatcacagttatcaattaaatattttttcactttctccttcaaggacagttttgctgtattggctggagaagtgcttgctgcactcatctgtactgctttcgtatttgtcatatcggttcctcctttcttttaaaatggatgtttttcttttacggttcctatgatatcattgtatacaaggattgattagatgattttttgaccagtttttagggcaatattgacatggaggctggatgataggaaaggaaaacgctgacatatgtatgaaacactctacagacttgaaaggacaggcatagatatcaggtattggactaacaagggacagtatacccctccccattggcatacggccatcgagctgatctatgtgctgaacggtacgggatctgtgatctttgatgggaaagagtatctcacaaaagcgggagatctactggtcattgactccaataaaatccatgagatgaagtgtgcggaagtgtccatgatgatcataatccagttctccaggaaaaggatgaagaactacgtcaaggacattgacagcttccgtctgtcctgcagccgggagagcgcggagcatggaaaagaaaaggaataccattcggtctgcggacttttgcgtaagcttccccttttgtatgtgagacagcccgtgggatatgagctaaaaagccaggcagtcgctatggagattctgtatgagctgctgaatcatttcggggaaaaggatatcgggaggactgcagagaaggaaggggctttaaaacgtctgggtgcaatcacggattatattgaagagcattacagagatccgatcccgctggaagagatcgcttctcatttttatctgaaccgtgagtatttcagccgcttttttaaaaagaatatgggagtgtctttctcaagatatgtcaaccaggtccgtctgctgcacatatactatgatatctgcaacacggaagaggggatcatggatcttattgagaagcatggatttaaaaattataaactgttcatcaaaatgttccgggaaatctatgggagcacaccgagggaagtccgcagtgagagaaaaggacagacataaaacaaaagcaagcctgcaaagaataagcaagcttgcttttgtttcttttataaagattgtttttcccatgggttatctgtatactaagtcgggaatttggaaaagagatagacttttggtgataaattgagtataattagaatatatatttataatatatttgaatattgttagataactattgcaaattatgaatatattatgataattttctaaaaccgagattggaaaggagaaactatggaaaaaacattgatcaccatcagccgccagtacggaagtgatggaacaaaggttgcgcaggttttggcagacaagctggatgtctggtactataacagagatatcctatatatggctgctgagaagatcggcgtggatgatctggatgagaaatcgctggaagaactgaattacaaaaaaagctcccgctatgtggagggactgagtgttatgatgggaacaccgggacacattccggtctacaatcagatgtttaaggaacagtccaagatcattcgcaagcttgccggatatggctctggagtctttcttggaagatgtgcagattacgtgctgaaagatatggataacgtttatacaatatatctctatgcagatgatgaattccgtataaggcatttgtctgaggcggaaggccatgaggtcacaaaatcagaattgaagaaggaagataagacaagagaatcgtactataactattacactggacagaaatggggcgatgtacaaaattatgatctggctgtcaatatgacgaagatcagtcctgaaaactgtgcggatttgattcttgagtacatagaaaaacgacagaaatagtcaacggtagatcaaggcagagcatcatgaaaaccaatctttggtttttgtggtgttctttttcttgtggggtctgctgtatcaggttataatgttctcgaagcaaaagtttcaaaaaaggtgaaaatcgaaagacgtcaggaggactttgacttgagtcattttatgtttgaaaacaaacaagtgtattatgaggaaaccggcgcaggaaagcctttattattcctccatgggaacacggcatcttcaaatatgttttgtgagattgtgaaaatgtatcaatccgactttaaggtcatattaattgatttcctggggcatgggagatctgaacgattgcaggaatttccagcagatctgtggttctacgaggcagaacaggtcattgcatttttacgagaaaaatgttatacaaacgctaatattattgaaagcagcggcggagcactggcagccatcaatgctgcgttagaagctccgcatcttgtcaataaagtgatagcagacagttttgaaggtgaaaaacctctggaaccatttattgcaaatatcaaagctgacagagcgctgtctaaacaggatgaaaatacaagaatgttttatctcagtatgcatggtgctgactggaaacaggttgttgataatgacacaaatgctgtctttaaacacagccaagagatcggaaccttctttcataagccactgcagtccctaaaacctgatattcttttgacaggaagtaagaaagatgaatttatatctgcagaatctccggatttttttgaagaagtttatggggatatactcaaaaagatcggacacggagaaatatatttatttcctgagggagggcatcctgctatgcttacaaatccaagtgatttttatcagttgagtatgaagtttttaacaaaataatacgggaaaggcagagagaggttttgaatagagacaaaaagaaggaacggattgaaaattttgagagacagagagaaaaaatgaaaaaggcaggatataaggaatcctctgggatcatttccgtgttgagggccaatgttttggcgtttgctactgccggaccaatttgcgttgcagcttatatcttatatttcatccgctggagggaaagcgggtggaccatgaatggaagaaatctgatcttcttttttgcactattttttgcatccatatttgtccatgaactgcttcatggtttagggtggagtctgaattgtaaagatggatggaaaagtattgcatttggtgtgatgtggagttcgctgactccatactgtcactgcagagaaccattgaaattcggcagttattcggtgggcttatatctgcctttctgtgtgttaggtctgggcctttttgcagtttccatgatcgttcccaataatacggtttttttgcttgcagtcctgaatatgctgtctgcaggcggggaccttaccattggatgttatcttctgaagcataaaaatgggttgatcctggatcacccaaccgactgcggatttatttcatttgaaaaataaagtattgtataaacttgacaagagccggactgatttttacataaacaatgatcaattcactaaaaataaaatttactatagtattctgaggatcaattgagtataatgagagcggaaacaggaaattaaggatgataatagtgataagtcataaataagatgggtatcttatggtatacccgcaaaagtaaatcagaaaggaattgaaaaatgaaaaaaacattgatcacgatcagtcgtcagcatggaagcggtggaactgaagtagcgcggattttggcagacagacttggggtatggtattacaatagagagattttatacattgcggcagacaagattggatttgactccctggatgagcaggccatggaggaacttaattacaagaagagttctaagtatatggaaggcctgagtgtcatgatgggaacacccggtcatattccggtgtataaccagatgtataaagaacagggaaagatcatacagaagctggcaggctatgggtccggtgttttcctcggaagatgcgctgactacatcttaaaagattttgagaatgtcacatctgtttatctatatgcagatgatgaattcagacagaagcgtctttcagaagccgagggacgggaagtgcctatggctgacatcaaaaaggaagataagactagagaatcttactacaattactacacaggacagaagtggggcgatgtgataaactatgatcttgcgctgaacatgggtaagatcagttttgaagaagcagcagatgtcatcttgtcgtatattgaaaaacataggtaatgacaagtgatgtcttttctagctatgataaaaaaggacagaaccggttttgcccggagctgtcctttttttataatataggcttcttaatcaatggtttccactgtgatggaattggaacggcagaaatctgtatactcttcctggggaagctggtccgtaaggatataattgatcttatccagcgggcagtaagtcatcagagaaaagatgccgaattttgagtggtctgccagcacatatcgctgcatgctgttggagacaacggcttcctttacccgatattcctcctcggaggcgtttgtcaggccgttttcaatggaaaggccggtgcatgccataaaggctttgccaatattaaaagccttaagatactcagagatcttcgcatccacaaaggagagggtttccctttttaagtagcctggaagggaaataacggtcagattctcataaggaagagctttcaaagaaacctgcagactgttggtgatgatggtgcatcgtttatcagaaatataatccacaatattgtggcaggttgttcctgtgtcgatatagataatgtcatcatcctctatatgatcggctgcaaggcggcagatggccttcttttcttctacgaatttttcgtggcgttctgcaaaaggaagcagctttttcgacggaagagtgtcatttaatgtgactcctccgtacactttttttatttttcctgcttttgcaagcgtgtcaatatctcttcggatggtgtttttggagacttggaaaatatcgcataaggtatccaaagaaaccgacttttcttttgtaatatactgttctatttcatcaattcgttttgtacgcatatgaaaactccctctcgtttatttgaattttggcctggtctggtcataaaaataaaagctttgttttattatagtatattatgagtaaattgaaaagaagcatttggtaagttgtgataaagtttaaagatctaaacttcgtcctgttttttatcagggaggattagattttttctgtataatgcggtatactaggtttacagtaagacggaaataatgattgagggagcgggcatgaagattacgattaaacagattgctgaaatggccggagtgcaccggtcgacggttgacaaggtattacataaccgtgagggtgtcagtgaagaggtaagacagagggtccagaggatcattgatgaatacgaatataaaccaaatcccatcggacaggctctgaaaatgcagaaaaaaaccataaggatcggcattatcctgttgaaggtggatgccgaggagattgtcagggaagggatacggcgggagcttacatcctatcagtcttttgatatccagctggactaccacagtgtgatgtatcctgacatcaacgggcagctgaagctgatccatcagatgattgagaaaaaggttgacggcatcattttaagccctatcaactccgaggagattgtccatgctattaattattgtatgagcatgaagatcccggtggttacggtcaactctgatataaaaggaagccagaggttctgctttatcgggcaggatggctccagggcaggcaaggttgcaggcaggctcatgggagagtttttaaacggcaaaggcagtgtggcggttttcaccagcgacggagatgccaggcagtctttcttttttgacaaaagggaagggggattcagggggcttttggagaaggagtatccgaagatccatatgctcaagagcatccgtacagacgaagatcctgcgatcattgtgcaggagacaaagaagcttctggacaaagaaaagaagctggatggtatttttattacctgcggaggcgtcaaggaagtaggcaaagtgctgaggcaggagaaaagggaagatatcaaggtgatatgctatgaagactatccggaggtgttagatctggtcaaggaaaaagtagtagacgtgaccattgcaacagagcttaaaaagcagggcggccaggccctggacgtgatgatggactatctgatctatgaaaagaagccgccgcgcaagcacttatatacagacatgaagatcattttaaaagaatgtattgaatagaaaaagatctgggaatgctgaaaacagattcccgggtcttcttttgttttttcatattcttaataaaagacaattactccagaaaaagagcacgagctcttttaaaatgatcaaaaaaatatataacaattgatataatcgcattttttgcatgccaaaaacaagagtattatttggaaactggacaattataccaaaaacaaggttaaattcttgtgaactttgtttattgtgttttgaaaaaaaactgatataataaaaacataagttaagagcacgagctctttaatataactcataaatggcgaataataaaggagtacgaactatggataacaaagaactgagaatcggagttgttggagttggagcgattggaagaacgcacattgagaggatcaatgaccagctgcagggcggcagggtaatagcgtgttctgacgtcaatacagaattcgggaaaaaggttgcggagaattatggatgtacgttttatgaagatggggaagagatgatcgcctccggagatattgacgcagttattgtcacaaccatagacccataccatgagcagtatgttatggcggcgatcaaggcaggcatctatgtattctgtgaaaaaccgctggcaccggaagccgaggcgtgcaaaagaatcgtggaggcagagatctcagggggtaaacagctggtccaggtcggatttatgagaagatatgatcagggataccgtcaattaaaagaagcgatcaagaaccgtacatatggagaacctcttcttctgcattgtgcacacagaaatcctgctgtggatgagagctatgacacaccgatggcagtggaaaattccatgatccatgagattgatgtactccgctggcttcttgatgaagactatgacactgcagaagttgtatttgctaagaatacaagaaggacccatgcaaacctgatggatccgcagataatgatcctgactacaaaatcaggagtgagaattgacgtggaggcatttgtcaacacagggcactgctatgatattaaatgtgaagtgtgctgtgaggatgcgatcttaaatcttcctgaaccgtctaacattgaggtatgcgccaatgctgtccgtggacatgcaatccacagtgattggtccacaagattcgtagatgcctacaacgtagaaatccaggaatggatcaattccacaaaagaaggacgtgtggacggaccgacagcgtgggacggatatgttggacaggtgacagcgaaggctgcttctaaagcaagagataaccagacagtagttaaaattgaaatggaagaaaaacctgatttttataattaaggagggatgtaagaatgaaaatagcgtttgacgtggatgtgctggcaaagcagatggatatcaaccggatggtgcatcaagttgcagactggggttataaatacatcgaacagtctccgcatccaaggatcaatccattctataaacacccgctgttctccagggaatgtgaggcagaatacaggaaagcactccgggagaccggagtggagatctcctcatttatcgtggtgtaccgctggtccggacctacagaggagcagagacagatggcagtagccaactggaaacggatgattgagatcgccgtggatatgggtgtgccagtaatcaacacggagctgtccggggatcccaaccagcaggagatctgcaacggcatgtggttccgttctatggaagaacttctgccgatcattgagagggaagggctccgggtggagatccagtcccatccgtatgacttctgcgaattaaacaatgagacttgtgatctggtgaaatccttccgctccccgaaccttggatatgtgtattcttccccacatggattcttctatgacgagggaaaaggggatgtgcgctccatgttacagtacgcaggggaagaactgacccacgtactgtttgcggatacgttcaaccagaccatggactgccgctatatcgccaacccgccgtggttaaacggaagaggaaaagcggatgtgaccatccaccagcatttagccatgggagagggagacgtggactttgacgggatctttgagacgttaagagagatggacttcgcaaacagccagttaagggaagatgcgccgaaagccggaggagacaacatcgcatgtgtatccatgttcggattcccggaaaagatggagaaacaggcgccggaagcaagagaacgcattgaacgggaactgttaaaataaaaatcagagaaaagaaaggaagtaagattatgaaattagctctttgcacagatgtattaggagatttatcctttaccaaaatgctggataaggtgaaagaactaggaattgacgccgtggagatgactgcgggaggctggggaggctgcaagcatgtacctacacaggaacttcttgaggatgaaaacaagctggctgcatacaaagcggagattgaaaaaagagggatggagatcgcggcccttaactgttctggtaatcctctttcacctgcagagatgggagaattacatacgaagtctatctatgataccgctgtgctggccggcagactgggagtggagaaattagtcatgatgtcagggctcccggcaggcgcgcctggggacaagactccaaactggatcacatccacagtgtcatggccggactatatggtagaaacagtccgctaccaatgggaggatgtagcaatcccttggtggaagaagtttgtagagcactgtaaaaagcatggagtaaaacaaatcgccatcgaagaattcccgtgccagctggtttacaatcctgagacactgctgaaattaagggatgccgttgacccgatgatcggcatgaatatggatccttcccatctgatcgccatgggggcggacccaattgccgcagtgcgtgcactagagggatgcatctatcatgtacacggaaaagatgctagaattgaacggggactgtgtgacatcaatggactggcagagtccaaaccggtaactgatacaaagaaccgcacatggaactatgttgctgtgggatgcggacaggatcttcagtggtggaaagaattcttctctgtatgtcacatgatggggtatgacggacatgtttcacttgagatggaagacttgactatgagcgtggaagccggactggccacttccattgacgccttgaatcagacgatcagcaaataggagaagaggtgaaggaatgaatctcaacggatataacaaatggacccagaaggaccgtgttaccggatttgaaaagtttgcgtacggatgtggagaaatctctacaaacattgtctttaccatagcgaccagtcttctggtcatgttctacacagatgtggcacatgtttcaccgtctgtgatcggaatgatcatcgccatatcccaggtgtttaacggggtttccgacatcacagcaggatttattgtggaccgcaccaggtccaaatacggcagggcccgtgtctggatgctaagaatgtccatcccgtatgcggttgcagcggttcttttaatgacagttccgcagattgcgccgatggctcaggctgtttatatctttattacctacaatctgatgctgaccgtggtatatactctgtttcagctgccgtttgccacgactatgacttatatgaccagaagccaggatgagagggcaaagatcaacattgtccgcatggcaatgagcccggttggaaatattctggtaactctgctctttacaaggattctcggcatgatgccgggaggcggaatggactcccagagaaactgggttgtgctgactgctatttacgctgtgtttgcagcggctatgatgctgttctgctttgcttccgtcagggagagagttgtggtgaaagatgacatggcaggtgaaaagatcccgctgaaaaaggccataccggcattatttaaaaataaatattttgtcatgctgttccttttcttcgtattcttcgccatgtatcagaccttttcagggacaatggccacctattactgcaaatggatcgtaggtgatactaatatcatcggaaatgtaaatacagcatgctacgggatcacgatcattgcgactctgctccttggcaaggtcatggactttacaaccaagaaaaactggtgtatgctgggcgccctgtttatcatcggaggttccttgatccttctgctgaaccctacgagcattgcccttgtaaccttcggcggtctgttgagaggaattggtatgacaccgatcctgggcatgatctttacaatgatcgcagactgcattgagtatggacagtggaaaacagggctgcgtactgcaggtgccatacagtcggccgttacttcaggacagaagttcggtcaggggatcggctctgccctcatcggttttattatggaggcaaatacatacagcggaaatgcatctgcccagagcgcacaggctctgagtaccatttcaaaccttttcatctatgggattgcagtgctgggagttattatgatcttcatcctttgtttctatcacctggataaagaatatccgaaggttatgaaagaattgctggaacgggaagctaagatcgagttaaaagaagataaataaaattgtttgattcatatgtttgttagattgtatagacgaaaaggcctttctgtgtgatgaaatcagcggagaggtcttttcctggtgttttatctggagtataatgaagcaggaacagatgaatttagcaagaggttctcaagggtataaaacatgctgaaaggaacagtgggagacgggatgaaagaacaggaaattaaattgatcgccatggatatggacgggacacttctgaccagccagaaggaagttacacaaaagacagtagaagtattagaagaggcaatggacagaggaattcagatcgtcccggccaccgggcggtcagtgaacgggcttccgaaggaactgacggatcttaagagattaagatactgcatactgagcaatggggccagggtttatgatttacacgaacagaggtcgatttacaaaaaccagtttgacacagatcagatcctcaagcttttggaagcggtcaatccgtaccatgctttccggagcatagcaaaggatggaaaggtatactgttataaagaagagctttataggctggaatcatttcacctgggagagtattccgaggagatgatccgtgcatccaggacgccggtagaggatttaaaagaatttatccaaaaggaaggcggaacttcagaaaaaatgacgctgttttttgaagaccaggaagaacgggcaaaggcgaggaaggaactgacagaatgtggtttatatgctgttgtggcttccttaaagaataatttggagatttctcttcattcctgcaataagggtgatgcgctggcccatctgatggagcacctggacttaaagaaagaaaatatcatggcctgcggcgatgccgagaatgattatcaaatgatcgaggcggcagggatcggggttgtcatggaaaacggcagtgatgagatgaaagagattgcggattatataacggacgatcacaacagtgacggagttgccaaggcaattgaagtcttggctttgaaaaattaaagtgcgtttcgtgctaatgaataagccagttataatccttccggcagtcgagaatatattcgatgtacactgttttatcttgaatttgatagagaacaagataccatttttcaataaacatcttatgatatttgtttgaaggaatatacgtttcctcaaagtagggaaatctttgtggcatatgtgaaagggaatgcagggcggctgttatctgtttctttttagccgtcgctgcttccttatgaacctgtgctataaaacggatatgagttcctaacatttttaccgccctgtcggaaacaacgactttgtatttttcatattctgtcatattttatacctctgtaatcacatcatcaaggtaagtgtctaactcatccagagtgcagccggatcttccggcaagccggtcttcctcaattgatagaagttcttctctgagttttaacattttctcccttctgctataggtttcgatgtccataacaaccaaatctccttcaccgtttttggtaagaaaaaccggttcggaggtctttctgcatatatcagcaatctcattataattttgacggattgccgcagatggacgaatattcatactgattcctccttttaagatgatagtaatattctatctatattataactgttttatacaatatagtcaatttggcagaaagatatctgtatcaagatataaaaatacctctaaagcagttttggctgtctgccgtgtctgctttagaggtattttattgtaagagcaaccctattctagctagattcgttcaaaatcagaagcgccgtgtttacagatcgggcatacaaaatcggcggggagttcttcaccctcgtaaatatatccgcagattttacagcgccagccggttttctttgtttcctgcggctggggtttgatattcttgtgataatatgcgtaggtaacagaaggtatatttgataagacttctccgtctgtgacatcggcgataaacattgtgtgtgtgcccagatcaactgtctctgccacagaagcgctgagaaatgcgttcgcatattggcttaaataaataatctcgttggaggaacggtcatagccggagaaatccttcagcttgtcaacatccctgccgctctggaatccgaaatgcttaaaaatatcaaagggaacctcctcggacaggatggatacattaaaggaaccggtgtcccggatcatatcatgagtgtaattgcctttattgactgctacggaaatacggttcggtgtggtcgtgacctgctggactgtgttgacgatacagccgttgtccttgtctccgtcttttgctgacagtacaaacaaaccgtagcttagttgaaacattgctgcttgattcatataaaaacccctttctatacttgatgagtattgtcaatatattcgaattataatccctttatgacacatttgcaatgcccgaatgggatattgctttacttttcagaaatgcgcggttataataaaacaaatgcgtgcaatgtgtcaaataaaaaggaaaagtgaggaaagcacatggcaggaacaatcaaagaaattgcagagcgtgccggggtctcccgggggaccgtggaccgggcacttaataaccggggcagaatcaagccggaagtggcagagcggatcatggccatcgccaaagaactagactatcattctaacaggaagacaaaaaagaacacgcagaaagcagacaaaaatataaagatcggggtcatcacccagctctcagaagcctcctttatgatccctgttaaagcggggatccgtgatgcagagcgggagctggagtatctgggagtggagcttttattgaaggatattgaatccgtagatgaagaagcccagataaaagccattgacgaactggaagcggaggggatccacggccttgccatcatgccggtgcagtcagagtgtgtcagggaacggctgaaccgcttaatggaggaaaaggggatcccagtggtcacatttaactccgatatcgtgggcaccaagcgtgcatgttttgtgggactggataacaagaaaagcgggtgtaccgccgcagggctcatgggaatgctgacacgaggaaagggcaaagtcctcgtgatcacgggattctttaccaacagtgtaaacagtctgcgtgtggaaggcttcgtgcaggagatcaagaattcctatccggaaatggaactgctgggcgtccagagcagctttgatgagacaaaggaagtggaaaagatcatcgaaaatacaatggccattgcaccggatctggctggagtctttgtggcatccggcggacaggctggagtatgcctggcttttgagaagctgaagcttgataagaggccatatgtcatagtctatgacgctacgcctaagaatacaaaagcccttaaagaagaccggtatgattttctgattgaccaggaaggctacgaacagggttacaggcctccgaacctgctttataacatgatccaaaaaggagaaatgccggagaaggaccatatctataccgatataaaaatcaagaacaaatacaatgtttgagtttttcaccacaatctccagtcggctctggaaaggcctccttccgattgtggtgaaaaactcgtgttgtcggctccttctgtatttcgatatctggaaaagtaactgaaagtagtggtgaataacgaattagaaacattatttctgccgtctcaggctgtcgcaaaataaaaggtgctatcctatgagagtttttcttcattgtttccagtcagctctggaaaggcctccttccaacaatgaagaaaaactcttagaggcggcgccttttgtcttgtagcagcctgctccagcagacattacgtccattttcaccagttcggaggccttgcattcgaagggacgttagtttttcttcttgaagcaaagactcggaggcggtgcgcatcgcgcagtgaggctgtctgagcgttagcgagttccgaacgggccgccggagagactttgctgaaagttagaaaatcttacgtccctgagacagcaagccggagaactggtgaaaatgtcatacataataagttcaggaagtgtccatcctaaggttatactaataaccaaaggaaggagcggccggatgaattgccgattagagcttggcaggttcacatataaaaatgatgtgcagatgaagattgcggctcactgtgcacaggtgtttgctggagtaaagccttcaaatgcggtgactctggacagggaagaaacattttccctgacgcaggcgctgaaagacactggaattcaatacagactgttatatgccgatgcgaaacggtgtgtctggctgttgtacagggaacaagaacttgaacaatatctgatgaaaagagaacatgaaacatttatgagggattgtggatatgattctgttcagctaaatgacatgtttacgattttatgtaaaaactactgggagtacaaaaacggtagaaaaggatttccccatgaactgggtctgattcttggatacccgctgtgtgatgtaaaaggatttatccgacatcaggggcacagttatctgttttcagggtattggaaggtttacggaaacccggaggacaccagaaaacggtttgaagtatatgaccttgtgaggtatcaaatcatcaaacaggtacagcacaaaaagcctttggcgcagattgcagcttcctacaccaattacaggatccataaacaatattaaaaaatatacccgcagggcacaccgtattttatatcctccgataggcgtgctacgcacgataaggtatgagtttttctccattatctccagtcggctctggaaaggcctccttccgacaatgaagaaaaactatcgtaggatgggaccttctgtttagctgtcgttcttatctagcagacactacatccattttctacatgattggagtgaggcattctaagagccgaacggaaatcatgtggaaaatgtcatacttttaatttgatagaagagtgaaacacatatggtgtcttgctcttctttttttgcgtgtacttgcgtgctaaataattgtgcaataatgacgaagaagtgtgtatacatttgtgtaatgtagcaaaaacgatcttttttataaaaagtgcttgcacataaatagcgtgcgtgatactataagcacataagaaaagcacataaaacgcattgaaagagaacaagaaaaataatgaaacacgcaaataacacgcaatgtgcgtaaaaaacaaaactgaggtgaaagttatgaagtatgttgaatttgaccagacaagaccaatggatttagtactcatcggaagggtagccatcgattttaacccggtagattatttccacccgttatctgagtgcactaccttcaagaagtatgtgggaggatctccggcaaacatcgcagtgggcatcacaaggcacggaaagaaagccggattcatcggcaaagtttctgatgaccagttcggagagtatgtagtagacttcttcaataaagagggaatcgatacatcccatattacaaaatgtacgaacggagaaaagcttggacttacctttacagaaattctttccagagaagaaagcagcatcttaatgtaccgcaactgcatcgcagacttacagttatctgtggatgacattgacgaagaatacataaagaacacaaaagcaatcctggtttccggaacagcattggcacagagcccatccagggaagcagtgttaaaagcagtgatgcttgccaagaaaaatgatacaaagatcatctttgacattgactatagagaatacaactggaaaaattccgatgagatttcaatctactattctttagtagccagagaagcagatatcatcatgggatctagagaagaatttgacctgacagaaaaactgataaaaccgggcagaacagacaaagaatctgcacaggcatggaacactgaaaatgcaaagatcgttgtcatcaaacatggcaaaaaaggatctacagcatataccaatgacggaaatgactattcaatcaaaccgttcccggttgaggcgttaaaaggctttgggggcggagacggatatgcatccggcttcttatatggaatatttgaaggatgggatatgatcgagtgtctggaattcggaagtgcggaagcggccatgatggtgagaagccattcttgttctgaagaacttccaaaccctcaggaagtcaaagactttatccgcgagacaaaagacaaatatggcgaaatgattgcgagagtataggaggatatgaaaatgagtacaaccagaatgacagtagcacaggctcttgtaaaattccttgacaatcagtatgtggaatttgacggggaagaaacaaaatttgtagaaggtttctttactatcttcggacacgggatcgccgttggtctcggagaggcattggacagcaatcctgggagcttaaaggttcttcagggaagaaatgagcagggaatgtgccacgtagcgacagcttacgcaaaacaaaatagaagaaggaagatcattccttgtgcatcttctgtaggacccggagcggcaaatatggtgacagcagcggctacagctacagtgaacaatattccgcttttggtagtgccttctgacacatttgccacaagacagccggacccggtgctccagcagttagaaaagagtgacagtctctctacaacaacaaacgacgcattcaaaccggtttgtaaatattgggataggatcatccgcccggaacagctgatgacagccatggtcaacgctatgcgtgttctcacagatccgtcagagacaggcgctgtgtgcattgcactctcccaggatgtagaaggagaatcttatgatttccctgactatctgtttgaaaaacgtgtacataggatcacaagaccttgcgcggtaaaagaagagatcgaggaccttgtaaaagtcattaaagaagcgaaaaatccgttagtgatcgtgggcggaggtgtgaagtattctgaggcaggagaagctgtagaaaagttctgcgaagactttaacatcccgttcggagagagccaggcaggaaaaagtgcctgcaagtcaagccacccttactgcttaggaggaatcggcgtcacaggaaccctggctgccaataccatcgctgatgaagctgatgtggtcattgcagtgggaaccagactttcagactttacaacaggatctaaaggacagttcaaaaatcctaatgtaaaaatggtgacgatcaacaacaataaatatcatgcatataaaatggatgcagtaaaagctgtcggagacgcgaaagtgacagtggaagctctttctgctagactgaaagaggaaggatacaagtctgcttacacaacagagatccaggacgcaaaggcagcctgggataaagaaatggaccgccttgcgaatattgagtatacaggcgatgactttgagccggagatcaaagcgagagatccgcgtacgattcctgaattcgtaaaacttacagggggacttatcactcagactgcagcattgtgcaaaatccgtgaggtcattgatgaagacgctaatattgtgacagcaggggggagtcttccaagctgtatgcagagaatctggaccacagacaaacgaggcggatatcacgcagaatacggatattcctgcatgggatatgaagtggcgggagcgctcggcgtaaagatggcagagcctgagcatgaatcctacgtggttgtgggggatgccagctttcagatgctccacagtgagattatgacagcgatgcaggaaaaacaaaagatcaacatccttgtatttgacaactgcggatttggctgtatcaacaaccttcagatgaatcatggagtgggaagtcttgcaacagagttcagataccgcgatgaaaacaatgagatcaagggtgatctgatcccggttgactatgcaaaagtcggagaaggatacggactcaagacgtacagtgtaagaacgatcaaagagctggaggaagcattgatcgatgctaagaaacaggacgttgccacattgatcgacttgaaggtcattccgaaaacaatgacagacggttacaaatcatggtggaacgtaggtattgcgacaacttctgtgaaagaaagcgtgcagaaagcatgtgaaggagtattggaaggccgcaaaaacgcaagacagtattagaaaagaggtatgacaatgggtaaagtattcggctatcctgagtttgatgtaaacggggaaaaggttttaacaacatatgacaatgattataaagaaatgctgatggacatccgcgtcttccgcttaaaagcgggagatgtgaagaccttctgcaaagaaaaagaggagaccgcggttcttttactaaaaggggatgtcgtattctcatttgatgaaacttccaaagaagtcacaagaaaagatgtatttacagaaggaccttgggcagtacatatctgcacaggagccaaagtcatagtggaagcaaaggcagactctgaaatcttggtacagtccacaatgaatgaccagacatttgagagtaaattgtatgcgccggaagatgctccttggggatattcctgtgtaggaaagttcggaaatgtggctaaacgccgtgtcaataccatctttgaccatgacattgcaccatactccaacatggtattaggtgaagtcttaaatgaccgcggaaactggtcaggatatcttcctcacagacatccgcagccggaaacttattacttcctgtttgaccatccggaaggatttggggcaagctttgtgggagaccaggtatttaagagtacagacggaagcttctcagcgattccagggggagaacttcatcctcaggcagtggctccgggataccaaatgtatacttgctggatgatccgtcatctggaagggaacccatggcttcagacagacagaaatgaagacgaacgctacgtttggcttcatgacgcagaattctaagatagaaaatcagaagaaagtataggaggataagaacatggcaagagaatttatcgcgccgggccagatttatactggtgagggtgcactggatatggcagaaggaaagttaggagctctcggcaaaaaagcgctgatcgtcacagataaggtgatggttgatcttggaaatgcagcaaaggtagaaactgctttaaaaaaccagaatattgaatatgtgatctacagcgagatcaacggtgagccgaccgacacaatgattgaaggcggactgaatctttacaaagaagaaggatgtgactttattgtcgctctcggaggcggcagtccaattgactctatgaaagcgattggtgcacttgtaaccagcggcggacagatttcagattatatgggaaaagtgatcacagaggaaacaccgacacttgttgccattcccaccacagcggggacaggttctgaggcaactcagtttaccatcatcacagatacaaaaaatgatatcaagatgctgctcaaaggcgctgttctaatgccggatcttgccatcatcgatccacagtttacaatgactgcacctcctaagattactgcggctacaggacttgacgccctgactcatgcggcagaggcttatacatcaaagctggcacagccattatccgatacatttgctctttctgctattaaaaggatcttcaaatatcttccggttgcattcaaagacggaaagaatgttgaagccagagaacagatgtcaatagcagcactggaagcaggaattgcatttaacaatgcatccgtgaccttagtccacggaatgagccgtccaatcggtgctatgttccatgtggcacatggactttccaatgccatgctgctgaaggaatgctttatctatgcgctggacggggcttatgaccgctttggcgagcttggcaaagcgatcaatgtggcggcagagactgacacagaccaggcagccagtgagaaattccttcaggcagttgtggatatctgcgatgagcttgaaactccttccttagaggaatatggaatcaataaagaagaattcttcagtgtgatcgacaaaatggccaacgatgccatggacagcggaagcccgtccaacacaagaaaagccatcacagcagaagatgtcaaagaaatttaccgcaatctgtggtaatcacaatgtagtaagtacgtgcgtttaacgtacttaaatatagatcaatgcagatttatgccactgaaactcctaaaaaaataaaaacaatgaaacaaaaataccccgagcctgaccctccaatacctggctcaaaaatgaattgttattgtgtaatatctgcattacaaaagtatggaccttttttctcctaggtccatactttttttatgtcataggaaattcctacggaacctcatatgacataaaaacgctccgcgaggatacacagaatgcgtaaggaaatcatttgactacgtcaaatcgcatttggcgcgcaaagcggacttgtccgctttgttcttttatagtccgttcttgacagttttgctattctgtattattatatagcgatagtaagtgttacaagatactagttgtgttcacagaaaggaaactgcagttggaaaacttaacggaaatgttaaaaggggtgcttgaagggtgtgtccttgagatcatcagcctgaaggagacttatggctatgagatcacgcgccagctcaacgctcttgggttcacagacgtagtggaaggtacggtctataccattttagtgcggctggaaaaaaataaattggtgagcatagaaaagaagccctctactatgggaccgcccagaaagttttactcgttaaatgacagagggtatgaagaacttcagctgttctgggcaaagtgggattttattacatcaaaaatgaaacagttaaaggagaaaacataatgaatgaattttttaataaatattttaatatcaagaatataatggaagaaaaacgtgcgtataaacagcagatggcccggatcgaagcgctgcctgaagactaccagtacacattcaaaaagatacaacaacatatgtggtcgtttgcttctggggatggatatgatatgctggagttgcagtatggattgatcgatttgtttgaagattgtgcggcagatggtaaaaatgttttggatgtgacaggagaagatgttgcagggtttgtagatgagcttttgaaagatgtgaaaacatacacgaatcgctggcgcgataagctgaaccgtgacattgcgaaaaaagtaaaaagatagtcaagacagatgcagaaggtgctgcaaaaaggagtgttggaatgaagatcaatgggtttttgttattgatcccatttttgcttatcagattcggctttttatcgattttgagcaaaggggcggtaaaacgggcggcgtactttccgcccatgaacggaagtgaagtgccggcatattggatttaccagatttcaaatgcagcgatctttatctatttatggtttctcacagtaaagatagaaggtacatggctgtttgttgcaggtcttgtgatctatttagcaggactggtactgtgtgcggtttcaatgctggatttctcggctccttcagagacgggattaaattataaaggtgtttaccgtttttcgcgcaatcctatgtatgtatcttattttgtttgttttttaggatgcgctgtgctgacgcgttccctgatcttatatggttttgtccttatctttcagattacttcccactggatcattctatcagaagagagatggtgcattgagaaatttggggaagtgtacaggcagtatatgaaaaaggtaaggcgctatctttaaagcttacaacaaacaaagcgggcaagccatctcatctcctagccgctcgttctttaaggggattgaaggaaagcggcagccggtgacatgtaacaccagctgccgctgttatatacaaaatttacagttccccggtcagaaactgggcctttccgaatccaaaactccagtccgcatccccattttccacgatggagaccaagagatcctggggttcgatctggcatcggtcttttaacctctggccaagcagagaatagagcagctcttttttatcctgagttctctgtttgcttgtgacccggatgacgatctggttctttgttcgttcaaacccaaggcctgtgtctaacaggatcatttcttcaggatcatgctggttcacaatctggtagcggtcccgttctggtatatcaaaagcttctacggcacactggtggatcgtatcaaggatgtttctcagtctttctttatcattttgttttaacagatctacttgaattaatggcataacgaaatcctctctttctatgattgacatataaaaataataatggtaatataacagtatcaattaattagcatacgaactaatggtatgcgaattaatttgtatgggtatcatagcacagcaatttttaagagtcaacttaaattttttctggataaaataaaaacatgacggtgaggggagtggatgaagaatgagaattttggtttatttaaaagaaataccgccggaagaagaacgggatctgtaccaggatacagaggggatcaatgacagtgatcagaatgtcttaatggaggcactgaatctgagggacaaggaaggcggaactgtgacggtcatggtcatcgggccgtccacaggagagaagacagcaagggaggcgctgacctggggagttgacaggtcagtcctggttttaaaggatggaaaggctacaggggatatcctggaaagtgcaagagtgctagcaaaagccatagaagcggaaggcacatttgatgtaattttgtgcggaagacaggcgatagatggagatgcggcccatatggcggctatgacggcgtcctttttaaatatcccgcttattgccttctccaaaaaaatggagatctcggacggaaagctgtacaactggtgtatgtccaaagatgggacagaacggacagagtgttgtatgccagcactggtcctctcagtgaaggaagacaacaaacgaaggcaccccaatgtctgtgatattatgtcagcttatgccgggagcactgtgatcccggttataaaaccagagagaaatacaccggagaagatcattagacaggttgggcagtatacgcccggcaaaaaacacaagaagggaatgatgctggccggaaaagatgaacaggaactggcgggacaactccggcagatattaacgaagttcacggcagcaaaataggagtaggctgtatggaaagagtatcaaagattttgattattggagaaatacaaaatggacagccagccccggtaactctggaattattaggggagggagagaagatagcctcttctctgaacgcaaagcttttactggctgtagcgggcagcggtattcaggagatcttaagtgagcttttgcagtatcctgtagacaggatcattgcagtggatcatcccaggatggaattggatcaaacggagacccacgccagagttttggaggccgtgatccgggagcacgagccggatatgattctgggaggagcaacgttgtcaggaaaggtgctgctgccaatgctggctgcggttcttggaacagaagtggtgacagacgcggctgacctggagattgacaaggaaacagggaaacttctgatcagcaagccggcgtttgacggaaaaagaatgtctatagtatcgatgccaaaggcccacgtacagatcgtttctgtaaagcccgggatttttgagaaggcctgcaggacggaaagaaaaagaggcggtatcaccatggtggcggctgactggctggaagatatcaaagagcggaaaaagatgctggagctgatcacagaagacggcaacaagatatctctggaagattcaaagatcatcgcagccggcggacggggactgaaagggcctgaaggatttgaactccttacacggtttgcaagagaaatcggtgcccaggtgggctgcacaagaccatgtgtggatgcaggatggacctcgccggagcagcagatcggccagaccggattcacaaccaaaccggatctctatctggcttttgggatttccggtgcgatccagcatatgaccggagtccgggcaaagaccgtgatcgcagtcaataacaatccaaatgcggcaatttttaattattgcgactatgggatcgtcggggatgcccaaaaaatattgagagaactactaagagaatagaaagaagatccggtatttcacggatcttctatagataagtttatagtccaaaagaagctaaaacgataaagattccgcaggatataaatggtatgataatctgcgtaaccgcaatatcccagtaggcttccttatgggtcattttacaaatgccgagcagagtgatctgcgctccctggtgaggaagggtatccaatgtaccagcggcaattgcggaaatcctatgtacataaggcagaggaattcccatcttgatataggtagacttcagtgcattgaaggcaacgcccatcccgccggaagcggaaccgcaggctcctgcacagacagccacagtgatcattacaaataccagaggcggcatgctcatatctttgagagcagcgaccagatctgtaaacccctgtgttttctgcacaacgccgccgaatcctacgacaatggcagtattcaggatagcgacaccggaatcagatgcccctttgttaaagacattgatccattcgttgatgcctttgactctcttgaacatcagaactgtagccagagccacgcctgcaaatacggatgtctctaccggcagctttacaatgttaaagagtaccaggattacaatgatcggaaggatagcgatggcaacatgaggaagatctttgttttcatcaattgccgtctcctcttcacttaattgatactttaaagatttgtcaataaagcggtatcccttttttgtaaactttcttgcgcgcatttccagccatacaaagatcattaaaaacatagcaaccgttgtgatcagagatggaacaaatgcggcagttgccggtgtaccaaggttatccatagcaataacgttctgaatggaaggagaaccagggccgctcatggaccaggtccagcatccggcagagattgcagccgggataagccttctcgtaaggttcgcctctttaaataagttcagagcgatcggatagataacaaagaatacaacaaagccactgactcctccaaaggtcaaaagaccggtgatgatcatgatgatcggtgccacgaactttccgcggcagagacctgcgatggctctggcaatggattctgcggctccagtatactggtaaacagaaccaaacagtgcgccgacaaagaagacaaggaaatactttgtcacgtagtcggacgctgcaggcatgaacgcattttttaacgagtccagaattgggagtttcgagcagatgacaacaaagatcgtgacaagcggagccaggatcaaagcgctcatctgtttaaatgccagaactccaaacaggacaatcgccaggactaagactaagatttgtaaattcacaaaaaccctcctttatttgtggatcgttaatcgtgcttcaggcccatcagctcatctttgaagattctttcatccatgaactttggcgttccttccatctttggagcaaatcccatatgatcgatgatctgtgtctggatatcgataccaggggcaacctctgtcagatagacgccgtcctttctgagttcgaatacagcacgttctgtgatatagagaaccggctggccgactttatttgcgtattcaccgctgaaggtgatctgttctacggtatccaggaatttgtttgattttccttcctggtcaatgataagtttcccgtcttttacggatgtcttcagacctcctgcagtaaaagttccgcagaagtagcagcgttttgcgttctgggtgatattgacgaaaccgccgcagcccgcaatccttggaccgaacttgcttacgttgatattaccgtctttatctgcctgtgcgagtcctaagaatgcatagtcaactccgccgccgtcatagaaatcaaactggtacggctgatctaggatacattcagcattgacagcgcctccgaatttagctcctccctgaggtacaccgccgattggtccggcctctacagtcagagtcatgtaatctccaatgccttcttcgttggctaccatggagatgtactctggaataccaatgcctagatttacaaccgtgttttctgtcagttccatggctgctctgcgtccaatgatcttcttggcggaaagaggcgggtactcaagactgcttaacggaacccggaagtctccggtcatggaaccatcataatcacagcccacgcattgttcgtgatccttcatgtcttctacttccacaacggcatccacataaattccagggatcttgactaattttggatctaaggtgccgtctgaaacgaccttttctacctgtacaacgacctttccgccgctgttctttacggcctgagccatggttgtgacctctgtggtggcacattcgtgagacagagttacgttgccgtgttcatctgcatatgtaccgcggataaatccgatgttgatcgggaacgatttgtacaataatttctcttctcccaggatttcaactacatcgacgatatcttcggttgtaatgtcatttaatttaccgccctcaatgcgtgggtcagcaaatgtatttaatcctacatgactgataacgccgggtttgtgacctgcgatggcacggtataactgtgccagtgttccctgaggcagattatagccttcgattttattgtccagaaccatctgtcccagtgcaggaaccatgttccaatgtccgcctatgacacgttttgtcataccttcatgggcaaaatgatccgcgccgcttccgtcacggtttccctgggcggcagcataaaacaaagtcaggtttttgggggatccggtttctttgaatcttttttccaaagcttttgtgagagcttccggcattccgctggcaacaaatccgctggttgtgatcgttgtatgatcctccaccagggcagcagcctgatctgctgtgataattttaacttttcccatagtctttctccttgataaaatggtgttatgtaattcctagaaatcttttaaatcagctttacgtttttcaaggaatgctgtcataccctcttttttgtcagcagtggagaatgcaagtccgaataagtcagcttctaatgtaagaccgctgcttaagtctgtgtccattcctgtgttgatcgcttcttttgcaagggaaattgcgtagcttcctttggacatgatctttgcagccatcttcttacagtaatcgatcagctccgcctgaggcactactttgtttgcaagaccaattctgtaagcttcttcggcatcgatctggtcacatgtaaagatcaattcctttgcgcgtccttttcctactaaacgggagagacgctgtgttccgccgaatcccggaagaattccaagtcctgtttctggctgtgcgaattttgcgttttccgcagctacacggatatcacatgccatggagatctcgcatccgcctcccagagcgtaaccgttgacggcagcgatggttacctgaggcattgtctctaacttaagaaatgcttcttttgccaaaagacccatctgtcttccttctgcaggagttgcattgaccatttcagagatatcagcaccagctacaaaggatttttcgcctgatcctgtgaggatcaccactctgatgtccttgcgtcctgaaatctctgtaaagcactggtctaactcagctaaagtttcactgtttaaagcgtttaatgattttggtctgttgattgttacaactgcgacttcgttttctacttccattaataaattgttcattacaaatcctcctagaataacatacagattacatttgataagttctcgttagaaaattaacatattggcgcacaaatatttgggatacaaaatattatttatgcttataatatggactatattcgcctggttgtcaatggtttatcaatatgttttatgtaaattgtatataagtataaaaaaatataaaattttattgacagtatgcacaaagagtgatatatttagcttacaaaatattagcgtgcaaatacatggatataaaatgataatatttatatcaagtttatagtctattttgggtgaaaggagtaactatctatgaattttgaattaacagagcagcaggcagccattcaggaaacagcaaggaactttgctcagacagaactgcagccaggtgtgctggagagagatgcaaacagtgagtttccggtagatctttataagaagatgggggatatgggcctgatcggtcttccatatccgaaagaagtcggaggacagggagccgattatctttcttatgcactggcagtggaagagatctcaaaagtagatgcctctgtgggtatttcctattctgtttccacctctctgtatggcggaagcattatgaactctgatgcttccgttgagaaaaagaatgaatttctagcaccggtactgtccggacagcatttcggatcctttggactcacagagcccaatgccggatcagacgcaggcggatgtgtcactgtggctgaaaaagatggggacgaatacatattaaatggtatgaagtgttttaacaccaacggacctttggccgattatacagcggtatatgccctgacagaacctgagaagaaagcaaagggtctttcctgctttgtagtaaaaaaaggaactcctggattttctgtaggcaaggtggaggataagatgggaatccgctctgcgcaggtctctgagatgatcctggaaaatgtcagagtacctgcagagaatatggtcgttccatctggggacggatttaagctggccatgaagactttggatggaggacgcatcggcgttgccgcgcaggggcttggtatcgcggagggcgcatttgagatcgcaaaagaatacttaaagagcagagaacagttcggcaaaccattatataaaaaccagtatcttgcatttaagatggcggaacttgaaatggagatcgacgctgcaagatacatgctttacaaagcggctacagataaacacgagggaagatcttactcaatcccggcagcaaaggcaaaatacctttgtacagaggccgctatgcatgtgacaacagaagcagtacagatgttaggtggaaatgggtatatgaagggttaccatgtagaacgtatgatgagagatgcgaagatcactcagatctatgagggaaccaatgaaatccagaagctcgttgtaagcggagctatcttcagataggcctaatataaactctggatcttttggggatgtcatttgtggcatcccttttgtgttgccaacgttgttctaggtcaggcaattatttctttgtcttcttgacagaagtttgggtaacagatatgatgagatatatagcatgctaacagtttgtggtgtcagtatgcagttttgtgtaggagggataaggaaccgatggaattgaatcaatgtatcaactatcttttgactacagcgcagcatgcggtgtttcaggagatgagttcacagcttgctaagtatgacgtgacaccagttcagtacggcgttatgtactgtctctgggtaaagaagaaaaacagcccgaaggagattgcggaggagctgaaactggagaactctacgatctcaggggttcttgagagaatggaaaaaaagggtctgatcaagcgaaaagtcagcaaggaagaccggcgttttgtggagatcattctgacagataagggaaatgacttggaagaaccgattctggacacagtggaagaggttaacaggattgtactgaaggatatgggacatcaggaacaggaagctttgaaggcttcactgagacatttggctggaataaacgaatagtttaaaagagaaaatgcagcggaaagaactctttcctgctgctatttttttcatcgaattatttggttagaaggaaaaaaataaatttttatatgaaatgaggaaaatttaataatatgagaataaatcttatgtttactgcaa

SEQ ID NO: 29 - DNA, 22048 bp, Anaerostipes rhamnosivorans
atatttaccaaatttaataactatcttttagtaaacatcgataataaatttataaccaccggctggacggactccatgcaataaggtatactataggttaatatatagaatgtttttcgttactaaaggagagtttgtatggccactattaaagatattgctgccaaagctggggtttcttccgccaccgtttcccggattttaaatcaggatgacacattaagtgtcacggacgagacccgaaacagagttttaaaaattgcagatgatcttaagtatcataagaagggaaaaggggcatcaaagagaaccaccatcggagttttccagtggtactccctgttccaggaacttgaagacccttactaccagaacatccgtgtagggattgagaagtattgtgccgaccagaacatcgaagtgatccgggcattccaaagtgatccggactatacaaaaaccttgagtggtgtagacgggctgatttgtatcggaaagtttgcccccagggatatcaaagcttttgaacagattactgacaatatcatctttattgatatgcgtacttccaggatttcttttaacaatattgtgctggattttcatcagtctgtgatcgatgtgattgattatcttacagaattggggcaccgggagatcggttacctgggcggaaaagagtacattgacgaagacacggtttattttgaacagcggaaggaaacttttatgaattactgccggaatcttggcattcgctacgagccgtatttaatggaagaagagtttagtgcggaatccggctaccagatgatgaaccggcttatagagaacggaacgcttcccactgcagtctttgccgccagcgatcccatcgccatcggagccatgcgctccctctatgaacacggctataaaataccggacgatatttccatcatagggtttgatgatatcagtgttgctgaattttcaaacccgcctctcaccacggtgcatgcaccgtctgagtatatgggagagtacgcagccaattttgttgccaagctttacaatgaagttccaagcgagtacaaaaccccggtgcgtctgactctgccctgtacactggtcaaaagaaagacctgcgggaaaccaagaaaaaactgccggaggtaatcacaattaccaatccggcagttttttctttactaaattatttacttctttcaggatgattgcgataaggtgtattcattgtcagtaagctggaaatccagtccgctgctcacatagacatttttcttcttatccacaaaaatagctttggcgccatactttttcaacagaggctggcttttttcaggtcccagcacaaaacatgctgtagacagtccatcgctgacaattccagaatcgcacacaatggtacaggaagtgatctctgtcttggccggatatccggttttctcatccaagatatgaaaatatcgtttcccagtctttttatccacaaagtatttctcatagtctccggaagtggagataaaggttccgctcttaactgtcaccccccctatggcctctccctgctgcccatttggattctgaatcccaaccttccagtcttccccgtccggtttctctccatagacaacgatactgcctccaagtgctaccattgcgcctgtcacactcttatccttctttaaaaattttaatgcctcatccgttccaatcccttttccaaatgctccaagatcaatctttatagatgaatttttcttgactgttttattcttgtcatcaagctccacatgctcatatgcattgctgatgacaccttccttcagcagtgcattgatcttttgggcatcgggagcggaaggatttttagactcaaagtcccacatctgcgtcaggctgccgatggcagggtctgcggcgcctccgctgtctttggcaatctgcagggattttttaagccaggtaaaaaggggttctgacagtgacacttttcccctgtttccccgatttaattttgccacgccggaagattgttttctccaggacagctgcccggtctccagctgtttcatctcatcgatcatcttctgctcaatctcattaagatcctggctgtttccatataaggtcgtattggtcacagtccccatggcataatccacatgggaatatttctgtatctcttccttcttctggcagcctccggccgcaacagcagcgatcaggatcaccatagctgtacataatctctttttcatgttttcctcctgtggttatccctgcgcaaaaagggctggcggtatcttttttacaagccctgctgtcaatgccccgatggcaataccggcgacggttcctgtcaccagaagcaccggtgcataataatagattcttacattctccatcagtaacacggcgacactgagctgccccaggttatgcgccactccgccggcaacactgagtcccactgctgaaaacccccctgtcttttttaaaagagccatgacagtgatactcaacacgccgcctgcaagactgtagacgatggtcattggatttccgaacaaaaaacctgccaacagtattctcagcacagagatgaataaggcccgtttccaagtagtaaaaaatagcagcaccatgatcactccgttggccagtccaatcttgatccccggaattcccaccgggatgggcagaagtacttcgatgtaagagactacgattgccagagttaaaaacataccgtccgcagcaatcctcctggtcattgcctgaactccttaatttgtaattccgtcatattccttctccttcgttccgtccttgatctccacaaccaccttatggggcaggcagacgatcgtctccccggttttatcaatggctttatgccgtctgcagatctgatcgcggcagtctgccttcgtaaccgatacttttttgtgttgaattcggaccacattcgtcccgttcttgcttttcactgtgtagaccgcgtcctcagagagactgccggaccacacttccttcccattcactgttaccacggccttctcaccgtctttctttgaagagtacataaataagaacccagctgccgctgcggcaaggacaagaccgatcaatatcagatcctttttcttcatgggttcaccttgatctgccctagaacctctccgatagggtccgttatgcacagctctgcctgacggtccctgcccgtagcatccctgttgatcagtaccagatgttttcccctgaagtaatcgatcattcccgccgcaggatataccaccagcgatgttcccccgatgatcagcatatccgccttggaaatagcatcgatggctccccgcatcacagatgcatccaacccttcctcatacagtacaacatccggtttgatcagtccctggcattcatcacagtgcgggataccctcgctctttaccacatagtctatgtcaaaaaacttatggcatctctgacagtaatttctgtgaacgcttccatgcagctcaaaaaccttctcacttcctgccttttggtgcagtccgtcaatattctgtgtgacgatcgctgtgagcttttccgccttctcaagctcggccagctttaaatgggccgggtttggctgggcttgtggaaacaacattttctttttataaaagtcataaaactctgcagttttctgtacaaaaaaagtatggcttacgataacttccggaggatactggtaagtctggttataaagtccgtcagtacttctgaaatccgggatattgctttctgtagacactcctgccccgccaaaaaacacaatcctgctgctttcatctatcatgttctgaagttgttcaatctgatccattgcgatacctccctatgtatttgtggacattttgcccgaaaagccttttttattcatagggaggttcatagaactttcctatagaaaaaaggccgcttatttcctgttttattttacaggaaataagcggctccgtccagtttaaccgatctctttgagcaaatttaccatttctatggctgacaatgcgcagtcatatcccttgttacctgccttggtgccggcgcgctcgatagcctgctcaatattctccgttgtcagcactccaaacagtaccgggatccggctttccatagacacatgagcaatgcccttggacacttcattgcagacataatcataatgtgatgtagatcctcggatgacggtacccagacaaatcacagcgtcatattttcctgaatcggccatcttttgggcagcgattggaatctcaaacgctcccgggacccatgccaccgaaatgtcatcctcccgcacatcatgcctgcgcagtccgtccaatgctccactaagcagcttggatacgataaattcgttaaatctggcagccacgattcccactttcatctctttcgcaactaattttccttctaaaatattcatatcttttctcctttttgattgtttgccgctgattaatacgttaagtaatgtcccatcttttcctgtttcgtcttcatgtaaaacctatcataatcggtaagcttgatctggatcggcacccgctctgtgatctctaagccaaaatctccaagcccttcgatcttggtcggattgttggttaaaagccttaacttggatgcccccagatccctcaagatctgggctcctatgtaatactccctctggtcttcctcaaaaccaagagccagattcgcctccaccgtgtccattccttgatcctggagagcataagcttttagtttgttgatcaggccgatgccccgcccctcctgtcttaagtaaagcagaataccccgcccttcctcctcaattctctgcatggctcttgcaaactggtctccgcagtcacagcgcagagatccgaaggtatctcctgtcaggcactctgaatgaactctgcagagtactggatttccatccgccacatcgcctttgaccaacgccacatgatgctctccgtttaactggttgacatatccgtatgctctgaagttcccatactttgtgggcataggggtctctacctcccggcttacgaacacctcatgttttttgcggtaattctgcagcgcttttatggtgaccatcttaaggccgaatttttcggccagctgcataagctcagcagtccgcatcatggtcccgtcttctctcatgatctcacaacaaagtccgctttctttcaggcccgccagtttcatcagatccaccgtggcttctgtgtgcccgtttctctccatgactccaccggcttttgcaatcagaggaaacatatgtcccggacgccttaaatcctccggcctgatgtcatcctgcatacactttatggccgtgacggaacgctccactgccgagatgcctgtggtggtttccacatggtcgatactctctgtgaatgcagtttcatggttatccgtattctgtcttaccataggtgaaagaccaagcttctctcccatagccgcgctcatgggcatgcagatcaggccttttccatggactgccatgaagttgatgttctgcgtatccgcaaattctgaggcacagataaaatccccctcattctccctatcttcatcgtctgtggcaatgatgatctttccctgtcttaaatcttccaatgcttcttcgatcgtactgaatttcatttcttatcctcctaaaatcctgcatttatcaacatttcctctgtcaaactgctgcttttttcttctgtctttggttccagcagtttctccacatattttccgatcatatcattttccagattgaccgcttcccccggcttcctgaaccccagtaccgtctgctttaaggtatgggggatgaccgagacttgaaaccaggaagtccctgtctctgcaatggtcaggctgatcccgtcaatggcgatagaaccctttttaatacagtagcgcaggatctcaggccgtacctcaactttgaaccagactgcgttggcatcctgtttcactgacaaaatcgtcccggttccgtccacatgccctgccactatatgtccgccgaaccggcccccggcactcatggcccgttccaggttgaccgggtctttggggcgcaggctttccagcgtgctcttctcaaaagtctcgttcatcacatctgccataaatccctggccgtcaaatgcgacggcagtcagacagacgccattgactgcaatgctgtcccctgtatgtaaatcttccagaatctttgatgcaccaatcctgatcatggaagactgtcctcccctctttacggatatgacagctcccagttcttcgataattcctgtaaacattgtttcacctcacttcatattccagcagaagatcttcaccaatcttggtgatctccggcccatctaacattacagcatcgctgatcctttcaatcccttctccttctaccggggatctggactgttttcctccaaacagtttaggagcgacataggtatatatcttttttacagctccggtccttataaccgaatcgttaatatcagctccgccctccacaaggacactgtcgatcttttcttttctcagtgcccgaaacagctccatcagatccagttgcccttttttctccggacagatcagaacccggcagccaagctcctccagcttttcagctttctttgttctctcgcaggcggccacgatggtcgggatcactttggcactctgaacgatcttggaagaaagcgggatcctcagcctgctgtcgcagatcacacgcaccggattgttcccgccccttactctggcattcagcataggatcatcacagaggacggttccgatgcctgccagaatggccgcatacttgtgtctgagagtatggacgtgctctctggcttcctgtccggtgatccatttggactctcctgtttttacagcaatcttgccatccagagtcatagcatattttaaagctacatagggtgtctcgtggctgatgtaatgaaagaagatgtcattgatctttctacactcttcctccatgattcctgtttccacctgaatcccgtgttctctgaggatctggacacccctgccggctaccttaggattcgggtccatgtttcccacataaaccctgcggatcccatgttccatgatggcctctgtacagggcggtgtctttccgtaatggcagcacggctccagtgtcacataaagatctgccccctggggatcctctgtacagttcttaaacgcatttctttctgcgtgcaggcctccgtatgcctcgtggaatccctccccgatcacccggccgccttttacaataaccgcacccacgaccgggttggggttcgtatatccaattcctttcctggccagacggatggcccgtttcataaactgttcctccataaaagaaaaacctcctttcaaagaatatagaaaagccccaaaatcctgcatcacaggacttcagggcttaaaaaagctaaagttcattcatggatcttgttgtattacgcaacaaaaccaataaaaataaaaaaactgagacttataacagcagatcaaatacaccaaatgcatctgacctacgctgtgcgtaaatcccagagttcgtttatcatttatcttctttcatccagactatactgtcggcttcggagtttcaccgaatcatgccttgcggctcgtgggctgtaccaccggtagggaattccaccctgccctgaagatcctattcaattaatattatttattataacctattataaacgtatgtcaatacttatttaaacaactttaagcagcattgttaaaatctacaacagcaatttctgtaatgatgacttttagtttttctaaaatgttttcaattttctgtaaggtaacaccatttagacattcttcaccacattgattacattttgtacatggcacgttcttaatgaaaccttgtcgcgcgttgcgcgtccacccgaagggtgtaaaatacgggatgccctgtgggtataatataacaattattgtattctgtcatatatgttgtaatagccttttctacatttcctttacataaaaaacaagtcataatgattgctcctttctggttttgaaatcattctcttacttttttatcacaataacttgaaatggttctaaaaatccttgtataaccggctggttactcaataagatttttccgtccacatttttgatctcctgtcttatttttgaaaagttacacagcacaaggatccttgtaaaaccgtcatttctctcatatgccacaacatcttttccatattctctgtgcggtttaaaactgccctgcaccagacaagattcccgtttccgcagggctgtcatctccttgtagaaacttaatacagattttttatcattttcctgtctcccggcttcttcccaatcgatcatctgccttgcgttgtccctgcttcttaaattaatataatacagtgcctcctcttttgtacacccatctgacagggccgtttcatactgccccctgctctcaatgtcgtcaaaactttcaatggaatccctccacacatttttgacacccaattcctgcccctggtaaataaaaggcgtcccccgcagaaaaaaatacatgcccgccagaacagtggatgcctcgtaagtctggtcctctttaaacggaaaaaacttatttactgcccttggctggtcatgattttctataaacagaccctgccacccggttttctggatttcctcctggctctcaaacaacagctccctgaactcttccatggtccaatcttttcttttatgccatttttcatcgtttccctcaagatcaaagttggtgtagtggaagtcaaacatcatagaaaaacagccctgatccccgatataatttccgagttcagaatacggcacatccaccgcttctgaaaccgtgatacacccgcacggctcaaacacctcttttctcatttccttcaggaacttttggattccctctacatttcttgtatagggaaaacagctagccaatccgtcttttccatcaggttttattacagaggcattcagatctttcttgataaagttaatggcatccacccggaaaccggcaattcctttgttcatccaccaccgaatcatttcatacagctcagatctcatctctttgttctcccagttgagatccggctgcttctttgaaaaagagtgaaaatagtattcatcggttcccggtacaggttcccagacagaaccgccgaacactgatcttaaattactgggcggacacccgttctggagtgtctcaaatatataataatctctgtatttactttgtggatctgccaaagctttgcgaaaccattcatgttcatcggatgtatgattgaggaccaggtccatcataatctttatgcctttcctgccggcctcatggatcagctgctccatctcgtccatggtaccgaacataggattcatgctgtaataatccgaaatatcatatccattgtcatccataggggatgcgtataccgggcagatccacagcatcgtgatcccaagatcctttaaatagccaagcttttctgtgattcccttcaagtctccgatgtcatccccgtcactgtcacaaaagctttttggataaacctgatagacgatttcctctctccctctgtaattctccattgactgcacctctctttccttctctccgggtagacgtactccgcttaataaggtatcatgttctcatcggtcttttttcccttccctgattttggaaggtcagcactaaaagaccctattgaatcatatgaaggagtgatatttttgaacaccaacaatgaaactgcactgggcactatgccgataggaaaactgttgtttcagctggccgtccccactatcgccgcccaagtcatcaacgcgctctataacatggtagaccggatctatatcggcaggctgcccggaggggaaggaccccttgccattgccggactcggcattgcattcccgatcatcatgatcatttccgcatttgcttccatgatcggtatgggaggcagcccaagagtttccatcaaaatgggacagaaggaccatgacggcgcggaaaagattcttgggaatgcggtgactgctctgactattctggccgttcctcttaccctgtttttttatctgggaaaggaatccctgctctccatgttcggagccaccaaaaacatcctgccttacggcaatgattacctgagtatttatctgatcggttccatctttgtcatgttctccctgggcctcaacagctttatcacctgccaggggtttgccaagaccagtatgctgaccgtgttgatcggggctctgctgaacattatcttagatccgatctttatctttggtctgggtctgggagtcaaaggttccgcccttgccaccgtcatatcccaaggggtatcggccctctgggtcatctgctttctgacaggaaaacggacagaccttaagatcagaagaaagtatctgcggcctgagctaaaggtactgctccctgtgatcgccctggggatcgcgccatttattatgcagtctacagaaagcctggttcagatcaccttaaactccggcatgaaacgatacggaggcgccaacgcggatgcacttgtttccatcaccaccattgccataagctccatgcagtttctatccatgcctgcgctgggtctggcccagggcgcacagcccatcatcagctacaactacggaagccggaatatggaccgggtaaaaaaggccttccggcttttgtttaccatcaccgtggcctatacttccgcaatatgggcactctccatggcagtgccccagatatatatctacctgttctccagcggggaagctgcccgtggactggctgcactgggaaaacctatgatccgtatctttatgggcggttttctgttcataggagcacagtacgcctgccagaacaccttcatggcactgggcagggcaaagatctcactgatcatggctctcctgcgaaagatcatacttctgatccctctggccctgatcctcccagtctttttgggaaccaccggaatcttcaccgcagaacccatcgcggatacactggcatctgctatcaccaccggggttttctactttacctcaaaaaaactgttgagacatccggaagaaccagacatcactcctaacatggaatgatgttatctggcttgtcggccggtttctccagaagatatttcatccattttccacatgattggagtgaggcattctaagagctgaacggaaatcatgtggaaaatgtcataatatcacatactggttctttcctcttattttcgcttcatacagggcgctgtccgctctttcgatcacctggccgtaagagtcgccgtcttttatcaacgtaatccctatgcttatattcacatggttctccgctgtcactgacctaagtacccttccggcgatctcctcgatcttttttctgtcttttgttccgtaaatcaggcaggtgaattcatctcctccataacggctgaccacatctttttcacgtagactcttccgaaggcagctggccaccccggtcaggacctcatctcctctttggtggccgtaagtgtcattaacccccttaaaatcatcaatgtccagaaaaaaacatgcaatgtatctccttttgcttttcaggtccttttccaagatcctctggaagttcttccggttcagggaccctgtcagcgcatcttttgtattttcctttttctcgctgcggtgcagtctaaaaaaccgaagactaaaaataaagagcagaattgtaatcatggtcccttttagcatcagaaacagggtctctcttttaagagaatagagagtttcctcataggtctctgccactgcaagagtacagatataccagtcactgattcctgctggttcatagtaaagcatccgtagttttccattgttgtggtaatataaatagccgctattccctttttggatattggcctccatggcaggcagttcactgctgtcatcatacttcatagtatccagcatctcatacatcgtatgaaatttctccatgcctttataggatgccgccacattgccctttttggaaaacacgagtacggctcccgtcccttttaattcttttccgtttaacattcttcccagttccatagtactgtactccaggcatactgcacccttgacttttccgtctctgaccagcggaacacctatgataatagattctgttccttcctctttgtccatgagtacctttgagatgctgctctgatctctcatcagacttttgtagtaagttctgtctgcgattttttgtcttttatgatcactgtagtaaatattgcctttcttgtctgcaactccgagcttcagcccctttgagtcaaaccttctgactatgtcccaccaattttcctgtcccgttccgtccggcacatcacagatcattgccaagctttccagccagttctggttgtctttgagaagagactgcagggatgcctttgccgtatcattggtcgtctttaagtcaagcctggtctggtcagcaattttagtatccattttccggtaatactgcacaaaagagaaaataaaaaaagagagcagcccaacgataagcagcagtatgatcatcgtattcagctgtctgttccctttctgtttctccattttacccccctggctcagtgttctggctaagtattgtctccattatacccctatattctatgacaatcaaagaaaacctctctccgggaactataaattccccggaaagaggttatccttcaaatacagattattcagccactgcgatggcttcgatctcaaacagcgcaccttttggaagagcccctgcttccacgcaggaacgggccggtttattgtccccgaaccgtttctcataaattgcattgattgccgcaaaatcgttgatatcatttaagaatacggttgtcttgatcacatgatccagagacaatccagaagccttcagtacttcgtttagatttgtcagagcctggtctgcctgtgcctccactccttctgggagtgttccttcttttggatccagcccaagctgtcccgatgtgaatacaaggtttcctgtttttactgcatggcagtaaggtcccactgccgcaggagctttgtctgcattgatcgtttcacgtgtcatcatgatctacctcactttctaaaaaatattaaggttcatacaatttttttgtgcttctattataacacaggcctttgcgcgcgtccatgcctttagtttcctataataacattaagctttgcattctgttgttcgatcttcttggcagccttctcacttaccgcatccttcgtagggtaataatcgatataataaaacaggctcttgctcaggttcttgaaggtatatgtattttttcctttcctaagttccgccatctgaggttctccctgttcatccatattgttcagggacagaaccggcttcagcgacagatctgccttggagagatcctcaaaggtcacagtgagctttccgttctgtgtctgaaaaacattgccgatgacaaggtttccaaaagtaccctttgccccatcggtgcccttcatggcatccacatcaaaatacagtacccctttgctgctgaatttcataaaacggctatctttaaatgaaagctttgacgcgtctgtctcctgatccaggttcacaaaacctttaaacagaggaatcacagtcttcctttttgtcttcacgtcatattggaccagagacagatttttaaacatctggtcttccttcatatagacaccggacggataaccgagaaaatccactgtgctgttattctggatcaatgcattggagtcattctgtccttggctcatcaactcctggatcacgtcctcctttggcctgcccgcaaaattcttttgttctttctgctgaatatcaccttcatagatgtcatcaaaggctttctttttatcggacagtgtcatttttttcacatcaaagaaataatcctcgactgtgtcctctccctttgttctgagaaggcgcaccactgtgccatcactggatacaataatctttgtttccgtctcaccatcctctgaaaacagcttcattttttccagatccagagcagcagatatctttttctctttcatatcgtagacataaaatcccgcagagttgtgaaacatcactgtgcggtccgaagcataatccagcttagggaaatcagatacctcatcctttttggtcgtctcccctataaatgtctttaactcctcttctgatgaaaacggttttaattctgattttttggaacatcctgctgccatgaaggccagcacagccgcgaataccataagaatcctgatttttcttttcatgagctctctcctttatttgatccatttcggagatggataatatctgaaacttgccttccctatgatctcctctctggtcacatagtgggtctgccactctctcgcatcgttggagctgttccgattgtcgcccatgacaaaataaccgttgtccggcaccttatacggtccgaaatcatccacgggctcctctttgatataaggctccttcaagggctttttgcttttgttgatatataccttcccgtctttgacttcgatggtctcacccggaagcgcaatgactcttttaatataccattcagtttcatcatccgggtatttaaagatgatcacatccccccgttttggttcgccgaacagataagcggtcctgaatgcaatgagtttatctcctgtcatgatcgtattttccatggatccgcttggaatgctggcgttgacaatgacaaagtttgtgatgaacaaagtgattgccagggtcgcaacgatgcacacgatccaactcctgacttcttttctgaagttttgtttctttttattttcctgctcctgttccttttccatgatgcctccttacttggacaaaaaacctctttgtcatatctacaaagaggtttttccttatttctagtctgtatatcctctgcggataatctcatgtcttccgggtccgttggagatcaatgtgatcggatatccgatcttctcctcgacgaactctatatactttctgcagttttccggaaggtcttcatactctgtgataccgcggatgtcgctcttccagcccggaagcacctcgatcaccggttttgctttttccagttcccctgtagtcgggaagtcagtggtcactttgccgtcaatgtcataagcgacacaaaccggaatctcctctaaatatccaaggacatccagaacagtaaaggccacatctgtggttccctgcatcctgcatccgtacttggaagctacaacgtcaaaccagcccatccgtctcggacgtccggtcgtcgcaccaaattcaccgccgtctccaccgcgttttcggagttcatcggcttcttccccaaagatctcactgacgaaagcccccgcacctacggcgctggaatacgctttgacaactgtgacgatctttttgatctcataaggcggaatacccgcaccgatagctccgtatgcagccagtgtggaggaagacgtcaccatcgggtaaataccgtggtccggatccttcagggagccaagctgtccctctaaaagaatcgtcttatcttctttcagtgcattgtgcagaaacagtgaaacatcgcagacatacggcgctaccatctccttgtattccatcagagtgtcatacaactcgtccgggttcaggagaggtttgtggtacagatgctcaagcagtacattctttgtctcacagatctttgtcaatttttcttttaatgcttccccgtcaaacagttcgttgacctggaaaccgatcttagcatacttatcagaataaaacggcgcaatccctgattttgtggatccgaaagatcctttgcccagtctctcctcctcgtattcatcgaacaggatgtggtacggcatcacgatctgggccctgtcagaaaccaggatctttggtttcggcactccctgtgacacaatctcctcaacctccttaaaaaggactggaatattcagcgccacaccgtttccgataatgctggttgtatgattatagaatacaccggaaggcagcgtgtgaagcgcgaactttccgtagtcgttaatgatggtatgcccggcattcgctcctccctggaaacgtacgatgatgtcagaagtttcccccaacatatctgtaatcttaccttttccttcgtcgccccagttggctcccactattgctttaaccatatgtgtatcctcctaattatcaatgacgtgtcttcgccattttcttttgcataaagcgaacaacattttaatattatattgttttttccaatgtgtcaagaatccgcagggagattcctacttttctttcacagaaaagaaagaatctacgcggtgtttatgatccagaagggaattatactgcagatactggtaatttgtaagccatttatctttgtcttcctcattctgagtctctacgttcttaccgtctttggtaacatatccattggcgttgatggccggaatctgtttctgaagttcctccagatattgattatatggagtgagctttaagtttgtctgctgaagcatcaatgtggacaggtagttggcgcttgtgagatttacgttgtccttctctttgatgtcataattggcccagatcacaaacggaaccgtatactttttctgcatctccttgatatttagactgtttaagtcctttccatagagaagttcatagaaatcatcttcaagcttcggctgatgatctccgaacatgaccacgatggtcggctctttctgggttttaaagtaatcgatcagcttcttgaatgcccggtcagattcgtggatcagggacagatagcgctcagcggtttccgtcttcttctcatccttgatggtgatctcctgtttaaagttatcatccgggatcaaatatcctccgtgattctggatagttacgttgaacataaacagcggattgtccgctttctttttctcaaaggtttctatgatcttgtcataatcagattcatcgctgacccagcctctgattctttttaccttggattcatccagagatgtctcgtccaggaaattatcaaatccaagaagaggatatacactctgccggttccatgcattcggtttgtaaggatggaacgccgttgtctcatatccctgttccttaagctgggaagcgaggctcggcacctgatgtttcacaaactgggtataagcatttccgttcaatggaagagaggaaacagagtttccagtcaggaactcatactcagagttgctggttccgcctccaaaaacagataccagcatatttcctttgatcgtattttctttcatggaattaatatacggcatcacttctttgttagtcttgatcttattgaccacattcaaatcagagaaggtctcattcatgatcacgaccacattcggtttttgtttcaaggacttgttctgtcctgtggtcacagtgtaatttttagcaatgtcctttactttatctacactgtatccttccggttctgttccaagcagatactggacatttaaaaggaagcttaagacaaatccatttcgtttgtatccctttttctggttgaagaattctacctttacattcttcgattccaaaaagttgactcttgtgcaaaggaaactctgtcccgccgtgagcgcagccacaaggaccagtgccacaaggcgctgcttccaacggaatgcctttatagtatccagcttccatgcgatgatcaccaacgccagacagataatggttgccacaatggcagccttattgtaggacagagtgtagtggtccgccacgtccatggctgtaccgagcgcccagatgtccgccggtgtgatcggtgttcccctgaactgcatgacaaagtaatttccgatggcgcatccgtataataacaagtctccaacaataatcgcatactttgtccggttgaaaatcagcagcaggattccgaagatgatatagaaccagatcacattcagtgcatatgagaagattcccatgacactgatcggattataaaataccttttccaccatataaaatgccagccatggattgataataaacagtgcccatgacagccatttattccatttttctggaatattcaactggatcaggagcaaaacgatcagcccaagtgcaatggcgatggtcaatccgatagcccacatgtcaacctgtgttgtcatgactctggcacagagcctgacctctgttttctttccgttctttacgagaggctggaacacggatcccatatcctttgaaatgtagatgtacagcggatcctttttcttgatcccgatgcctttgatcacataagtataggtttcgcccttctttaacttctggttgacgatcaccttgtaccagcggtcatcatgcagttctctgcgcctcatggtcgctttaatctcagtttttccgtctacctcttctatggtcggggtgatatggaatacaacgtttcccttggaatctttgatcttaaggtcaatgcttccgggccttgcgtccccataatttcttcccacacggaaatctaaacgctccgccgtgttgaaattggccttgaattcctgttccacagtgtctccgtctgcgatagcaatcttctccatgccgctttccggcacacctttggccacacgctccgcaaattgatctttgttctttatacaaagcacacagaataagatcaggcatgcaataataaagtatttaccaaacttatggataaagttatggatttttcctagcttatctttgaaaccatttgatttactgttcatgtttacttcccacctaatttgtattttttatgatgatcggatcatcctgtccctcttcaatgtatttaaaaattcccaagtattttaaagtctttgacctctgcccggatcccggtcagagcgttgcggatgcccggctcatttaagttgccggctacatcaatgtaaaacccgtattcccactgcctgttcggaagcggcctggattcaatgtttgtcatactgacgtcattaaacataaaatgcgccagaatgttataaagagatcccgtctcatggggcagtgaaaaactgatgcttaccttctttgcgtctttccggtactgctttttcttagacatcaccacaaaacgcgtgcagttattaccctcgaaattcactttctcttttaacacatccagcccatagagctttgcagcccgctcgctggaaatggccacctttgtgcagtcattgtcatccgccactttcttggcggccactgccgtatttctgatgcgcacctggtcccattttgtctcatccaagaactccttgcactgcatcagtccctgcggatgggaatagacctttgtcactttagaaagatccgtaccccggatccccacaagggcatggttgcattccacagtctcctctcccaccacgcatacgtcatgatttaggagcagatcgtaaataccgctgaccgttcccgcagaagtattctcaataggaaggatcccataatccgcttttccctcatctacagcaacaacaacatctttgaactcctctgccgtaaaatgactgatgtcttctccgaaaaactggaccatagcctgttcctgatacgctccagggatgccctggtacaccacctttgtgtcactgttgatctccagccggtccacctgtttgaactttttgcggacatagctgtcttcctctgacaaaagactgtattgataccggcgtccgatcgacatgagctgtaaaaataattcctcggtcccctttttaaggaactctggtcccacttctttcgtcaaagtctctatcttctcttgttccctttttctgtcatagatgggtttcccggttccttttttatactcagccacttcttcggaacactgcatccgttcctcaaacagccggacgatcttttggtcgatctggtcaatgtccttccttatatcaactaaatctctcatattaactatccttctcctccaatgcatcttttagttccagaatggtccggttgagcaccggatgtctcacatggggtgcaatctccgaaagcggttccagcacgaactgccgcttgggtatttctatgtgagggattgtcaggtgcggttcattgagaatcaggtcatcgtacaaaagaatatccaggtctaacgtcctggggccccagtgtacggtacgttctcttccagccttattttccagtcctaaaagaaactccagcagctccgacggattctttaatgtgtcaagcccaatgcatccattgataaatcggtcctggtcaacgtttccgtaaggttctgtctccatcagactggacacccgtacaatgcgggtatcctcttcctgtccgatttgttcaacggcacgcttaatatattccctgcggtctcccatgttagaaccaattccaatatatgccctgtgccattttctctcaatctttacagaaacactttggattgggagtccaatgggagcccacggctttttgacttctacctctgctttctttataagcgtaaactccatcagcagacgctctgcgatggtctccgccacccgttcaatcaagtcaaacgtgttcccttccatgatatcacggatcctgtggcacacttccccatagttgactgagtactcaatcttgtcgctgaccccggcccgtttagtatccgtataaagcaccgcggacaccaaaaacttctgccccagcaccttttcttccttatatacgccgtgattgctgtaaatctccagctctttaattatgatctgatccatatttctatgctcctttaacagcggcagatcgcctcaatcatagaaagggcacgcctgttttctttgacatcatgaacccggaacatccggcagcctttcatatatccgcttaccgtggttgccagagttccctctacgcgctcatcagccggcagatcaagcgtcagtccgatcatggactttctggatgtacccaaaagcaccggcaccttaagatcctgcaaaagttccagatgattcatcagcatcagattctgttccaaagttttagcaaagccgatccccggatctaatataatgttctcttttgcaattcccgcatcttctgcaagctccatggtctcttttaggtcttttagcacatcgctgagataatcatcgtagtctgtatctttcctgttgtgcatcagacaaaccggaagtcctgcctttgctagaagcggcgccatgctgccgtcccatttcagcccccatatgtcattgatcatatcggctccggcatgtattcccgcctctgccacctgggatttgtaggtatccagggaaataaccgggttaaactctctctttaaggcttcgatcaccggtgctgtcctctcaatctcttcccctgatgtgatcttctcatggcctggacgtatggactcaccgcctatgtcaatgatatctgccccttcgttcagcatacgctcggtatgctttaaggcctgatctatctgagtatattttcctccgtcagaaaaggaatcgggggttacatttagtatgcccataatatacccttgatgttccatatcaaattctttgtttcctatcttcatattaatctccattccgccgcctttcagtcggcggcacaaatagtaatgaaagattttcaaaacctcaactccatgagataatagcttcaagaagctacactacaaagcacgggaggaggagttgtaaa

SEQ ID NO: 30 - DNA, 21420 bp, Anaerostipes rhamnosivorans
atagacaacgttgtatttaattgtataaatggatggggatatgttggcatattgaccttgaataaggaagactataaagatacatttgacagaataataaattcaatcgatataaacgaagatgccaaatctaccacagaagccataacagaagccactacggaggcaaccacagaagctactaccgaagcatactcgccgactgcaggagaagaaaacgctctaagtaaagcttataactatcttgatagcatggcgttttctaaatctggattaattgaacagcttgaatatgaaggatttacaaaaaaagaagcaaaatacgcagttaataattgtggggcaaattggaaagaacaggccgtaaagaaggctgcgcaatatttgagcagtcaatcattttccagatcaggattaatcgaacaacttgaatatgagggatttacaagcaaacaagcaaggtatggcgtaaagaaagcatacaaataaatacaaaaactgcccggaggaaatttcatatatttaagatggggacagcagaaaaaattttgcaataaggagaagaattttttatgaagagaaagatattctggttatttacaactttagctttaatattttcaatgacaggatgtgtgtcaaagcaggaaaaaaaagtattgaagattgatgcattaaaaaaagaatatgcaagcataaattcgtttataaaatctataaattggaaatattccggggatgaactagaaaaagctggatactcaaaaacaactttccctgacgaaggatatgatttagagtattgtttagacgatattgttataaaaacgctaggaacggtagaaaaatctcatatctcagcatcttttaaatttaaaaatgataaattacaagacgttgaactatactaccttgcgagtgacaaaaatgactataaagaaaaatttgagataatctattcagaattagataaaactcagaggtttaaggaacatttcttctttgtcagggaaaacaaaaatgataaaggttcgatcggtaaattagaaaaaactgattcagcagttgaaaaaaattctgacttagctgatattgctggtgtttactatgaaggttttatatataaagcattttttacttcaaaagatgctcgatataaaacgtctcagctagttggaacaggtgccaaaacaaaaaacgatgacgtaggatttagcattatttataatattgcgaacgataattcatattcaaacaaatgataacaaactaaaaaaccgcccggcggcaaccggacggcacataagatactattatcaggatgacgcctgatataatacgatttgcactcatattatatcattttggcacccgttctggcaataggtgttatttttatacaattttttagaaaggatgatgtaatatgccaactgcaaaaaagctaccaagtggatcctggcggtgccaggtatacagccattccgttattttaacagacaaagatggtgatattgtatatgataaagataagaagccaaaaaagaaaaggatttatgaaagttttacttcagatgatccgacaaaaagaggaaaagtcgaggctgaggcaatggctagtgactttatactgaaccgaaaaggaaaaaagaaaaggtcaaaggacgttgatatgaccctattgcaggcaatcgacaagtatatagaccaacatagtgaatccctctccccctccacccttaaagattatgacacaataaaaagaaatggctttcaggatattatgctactaaaactcagagagtttgatgaggatattcttcaggatgccattaaccgtgaatctaagcgtgtttctaaggggaggtgtaagaatcctaagcctatatcatcaaaacgtctcagaaacgaatatggattgattagaccggtattaaaaaagtaccgaaaagatattgattttgaagaaatctctctccctcaggttgctccaagaaacccagaactcattccaccggaaattattttcgacatcataaaggataccgatattgaattggccgttcttttagctatgtggttatcattttcacaatctgaaatcagaggcctgacaaaatcaaagtccattaacggggactatataacaattagagaagttattgtagacggaaaagatggtccggtaaaaaaagaaatcggaaaaaataaatacagaaatagaagacataaaatcccggcgcgtataaaagaacttgttgataaagttgaaggggatgtattggttccaatgagtggcagtgcaatttataataaatggatacgtttattagatgaacatgagctaccgcacatcactttccatgatctccgtcacgtcaatgcctccgttatggccctgctccggatcccggataagtacgctcaagaacgtggcggctggaagtcagacaaagtcatgaaaaaagtttatcaacagacattccctgaagagcgcgaaaatgtggataagaaaattgatgattattttgaaaagaaaatgcaacacgaatgcaacacgaaaaagaaaaagagcacgtaaatacgcgctctttgcgatggactaggcgggaatcgaacccgcgtccaaaaacccatcccctcaggcatctcccattacagtctctgtattgacattccctccatgctgctcccagagacaggatcaacacttcagtagcttcataaatacttcatctgccgcaaagcttaagcagacgagggttctacattatttgaagcctaataacaggctgtagatgacctgtcacagactactgcaagcccttaggctgcagcgtacgctaatttattatctgcgtttaatttaagtttacaccgtaacgtggtctctccgaatggcttcccgagcttcagaatccctgtcgaaaccagtactagcccgaatatttccttatatagtataaccctttttttgtgaaaaagtcaataaaaagaaatagattatcccaaaaacatatcatagatcagaacaatgatagaaatatggacaggataaaacaaataaaaaaagtatttcatccctcttcctctctttccatggtatgtctggagaaccagcaatgtgccgagagcaaaacataactttatgatatagacaggaagcatatgtaaatcaaatccataagccaggatgtcctctgctggaatctttacaccataaaacaggaaaataagaataccaagggcaagtaatttctgctttttctctttcaaagcgtaacatacaaatacagcaagaacaccataacaatcataatctgtatgaagcaaatgagcagttgccgcacagaaggcaacgatcagaaaacctaccgatgctttatccctcttgttcatctcctcgtatgcgaaacatgcacatgcccccaaaaacagtgtaaataaaacattcgtgcaccctaaatgcagctttagaggcatttctgtgatggcatccaaaagatactggaacggaatctctgacaaaaccgcaaacaccaaaagatttcttaaataacgaaatctatgttttgtataccgacatgattctgcacagaagaatgcaaaaataaaaaacgacatagaagtaatgccaaaaagcagcactatgatgttgtagctcaagccttcacttatgtgtaaccatgcactcatcccagttacgatccaaaagagaaatactttatagatatggtctaaaagcatggtcacggctccaaatatcttaagttgagatgcggtatattctttatgtattaacattataacttttccttttcatactgccgggatcacctcttgttatagggtaaatgccgggtcagaatttgatctaaaagctggatatcaataggctttggcataaaatcatcaaaacctttcttcttaaacaactcctgggcctcttttgtcacgttggccgtcaaagcgatgaccggtattctcttcttttctgcgtcaggcagcgaccggatggcctttaatgtttcaatgccgtccatttccggcatcatatgatctaagaaaatcagatcatagctgtattccttcacggcctctactgcctctctcccggaacttacacagtcaatctgcatctggtacggggccatcaatgcctctgccaccccaagattgattttattgtcatctacaatcagcactttggcctccgggatcggctgtatcatggaaatattaaattgttcaactgaatcaaatgcatcctttttcccggaatacagcagggattccagcccaaaacagaacagtggggaatatactgctgcctcatccgccccataaggatcttcttcctgccgaagaagcacaatgcttttatatggccctttgatgcatgtactttttactttcgataacgtttcttggtctgccaggataaaatcaaaacgttcctgtacaacattcttcaaaaacttcctttgatccgattcaagccggtaggagatctggtaatcctttaatgttttttcgtacagggcacaaagatccttgtctggctcatatacagccagaacacgttctgtaggccagctgagctgaacaagtttttcttctccaaccggtctctggcaaatgaccgctgaaaaagaggccccttctccataaacactgtccacagtaatacttccgtccatcatctccgccagattcttggatatggcaagacccaggccggttcctccgctgctgtgactgtaatgagaatcaatttgttcaaagctgttgaacaggcggttcatatcctgctttcttatcccaatcccagtatcctccactgttatagtcagcaggaaccggccattttccatgctaccatgaaggtgcagacagatatatccccgttctgtaaatttcactgcattgctcagcaggtttaccatgatctgttttacccgagccatatccccgtataggagggccggaagatcctcgtctaagtcaacataaaattgtacaggcttatcaccgatttttaaaacagtcagcgctgttatatctgtcatcaggctcctcagactgtatttttcctcgatcagcgtaaatttccccgcttcgatcttggaatagtccaggatatcgttgatgatcacaagaaggcttttggacgaatgatcgatggtctccacatactctctctgttttgctgtgagatcttcccgcagtagcaattcactgactcctgtgacagcgttcatcggtgtacggatctcatggctcatattagccagaaatgttgatttcatctcagcaatgtgctgctggtttttggataccgcaagagaaaccacaacagtggtcaggaggactacaaatataacaacacaggaaacactgagcatcgccagctcctttgtcagtactgctgtatttgcagacactgcgtccttgcccacaatgtttacgaccgtccaatcatgaaatcccagaggctggtaatatgcatattgttctgtcccaaggtggtcataaagtgtcattccctttctattatgatctatatcatcctttactttttccagactgtaatcaccatcaaaaatattattttccagcactctaaaataattattataatccatgctctttgtgcgcagtatcagttctccctgtgcatcaatcatataagcatatccgtttccattaaaactgctgatgcttaaggcatcctgcaatttcttgatatccatcatagcaaccagagcgccgtccgggaggcctttttctccttcaaccgggatagaaaaaataattcctgaagcagccctgtcctctaagatcttacgctgcacatcagtgatcactgccttccctttgcacgcgttaatataataaggctcctttgaaatattgtcccgccgcttcatatcaggtgtccatagagttccctttctgtccgcatagccgataaaagcaatgcctggcttttttctgacatgggaaagataagatatcttattcccactgccctcaatggatgacagtgcgtcagccgccacctccagagaagtctgggtgtcctgaatgatcgtctgggtgtgggatgtaatctgctgtgctgtctcggccagccggacctggttttccttggccagagtctggtcaaacctgcgaaaataaaaaatgacagcaccaataaacacaacggtcagaagcagtatggccccgctgaggcagtggatcaattttttagaataacttgaacttctcatttttttcatagaccatactcccggctgtcattgtcatttttcctgcctgatcctctgtctccgcagcttgtccatcttcttcagacattccttttcagtgatgttctggtctgaaaccatgtattcctggatgcaggaggcatctgtctgagaaaatccccggatcctgagccacgcaatggaatcatgatagttccggtcgatcagacgctcagactgcatatactgaggcgtggagatacttgccgtctggtttttaaaaaccggtgccgtgtatatcctttcaaacgccttattataattaaatgggtctgccagaaaagtgacaaagttaatggcatccgacagttttgaactgtgtttattcactgcgaccagcgcaaggttgggaccctcaaaagtaccctggtctgggactcccatgaatgccggcatgatgccatactctgccggatttccatcaaagtccgtgtaaagccatgtatcccagcaaagcatcataccgtattttccgcttttcatagcactgttcattccgtcccaggtattgtcggtatacttctgtccaagatatccttttttggccatcgtcttataccacttcaatacactcctcatctccgggagatccaaataacccattttttggtcattcatgttttcaagcgtctgtgaatcacccacgatcgtgtccaaaggaaactgatagagcatcatcgatgattccttaaatggcatatacagtggagtgatgccgttctttttcaacacctcacagacttccagaaactctttctgtgttttcggaacccgtaaatgaagctttttaaatattgttttgttatagatggttccagaaatagatgcctcccagtggggaagaccgatgatctttccatggtagattgcctgattgactgatgtgtcagtcagatcatccacccagacagcattggtaaaatcatatagatttttatccggatcgatactgtcaatattcgttcccccgtaggtcagcagcaggtcaggcttgctctccttacctgcaaaagcattcttgatctttttctggaattcatctttcggaaaagattttatctctatatggccgcccgtggcagcttcataattattgacagctcttttcatatagacacgttccatctccggttcctgagaccaaaggaccaaagcctgtccgctgtttttcttccattgatactgaggtttcttataaggagatgccggtgccatggaaaccttctgtgaactgcaggaagtacaacccgtaagacaggctgccgcaaacagcagacatacgagcgtaaaatagattcttttcatgatcccatcctccttatgcagaaacactgctttcttaaagaatattatatcacgcttaaaccatgatgtggtaaaataataccagtcttaataagaaaaggaggcctgactatgacaaatcagaaaattgtattttttgatatagacggcacacttcacgatcattccggcaaagtgactgaaagtacacagcattccataacaaagctgatttccaacggccattatgcggtcatctgtaccggccgcaacaaaagtatcatcaaacaagatatcattgatctgggattccatggcatcatcgctggatgcggcacctatgtagaatttgacggcaaagtgctgcataacgccgtgcttcccgaacaggtgggaaaacatgcagtctctgtgcttcaccaaaccaatgtcaacttttttattgaatcccctgactacgtctaccttgatgatgcagcggccggcgaaaactttcaggctgccataaaaagaattaaacacagctacggccagaatctgcggcctctgtcttcttgtgattaccgcttttctaagattaccgggtacccaaaagaagacagtgatatcgctggactggttcagcaaatgcagccggaattccaagtgattcttcatccggaacaccaatataatgaaatcataccggctggttattccaaggcatccggcatccaagtcctgctctcccacctgggacttgccccagaagacagttatgcattcggggacagcagaaatgatcttgaaatgtttgacgcagtctcctacggaattgccatgggaaacagccctgacgaagtgaaatgccgggcctcctatgaaacactttctgtggcggacaacggaattgaatatgccctgaaaaaattcggattgatctaaaaatcccccattctgtactaggcgtttttgtcttatacaggatgggggaattgttattctctgctttctcttgtttccgggcaaagtctgtgtcttgctgaaggattccttttgtcatagtctttgaaactgtaatccatatccacagcaccatggatgcctcttacccttccgtcactggaaaactgccacatatccacatcctccactcctaaagtaggctgatatttggcaagccacagctcatattccctgagtctttctatatcaaaatagtcctccaggtcagataaatttgtgtaaaacataggcctgtaaccggatcttctgatttcattacagaattcccttgtaaagtcagttgccagatctctcgtgatgataactccttgatccctggcgtaatcaatcgagtcttcttcaaaatcaaaagccaccggatactcaatccgatatctccggataatcctcacacactgtcttgcttcttctctggccatctcctttgtataggcatagctgaaccagtaggctcccaaaggaatcctttcacggttacattcccttgcattgcggtcaaattcgtgatctatatttccgtcgccgaatccggccctgaccattgcaaattcaataccatcctgtttcactcttctccagtcaatccggccgtcggcgtagcttacatcaattcctttccttctgtgcatacgtacctcctgtccttttgtaactataatatgcggaaagggccgggaggttccgtgcagctatcccagatttctgaccttaaagtctctgagggcttctctcttctggtctttcttggcgatatcctgacgtttgtcatacagcttcttaccgcggcaaagcccaacctctaccttcaccaggcttcctttgaaataaacccggagagggatcagagtatagccttttctgtttacttctgacatcagtcttgtaatctcagaactgtggagcagaagcttcctttctctcaatggatctttgttaaaaatgtttcccttctcatatgggctcacatgcatctgtttcacaaagatttctccattatcaatgctgataaaggcttccttgatactgcagtggccctgtctcatagattttacttctgttccaaaaagcacaattcccgcttccacggtctcttccacaaagtaatcatgacgtgcctttttgttattcgcaatcagctttgttccgcccgtcttcgccatgttcatcctcctcaacaatctcaaaatcaatatttttcaaaatcttgtcaactccagtcaccaggatctgtaccggctgtccaagcttccatgtgcgccctgttctctccccaaccatagagtatgacatctcattataattataataatctcccggcagctttgacacatggaccataccttcaatcgtattcggcagttctacataaatgccccatccggtcaccccggagatcacacctttgtactgctgcccgatatgccgctccatatactccgtttttttaagcttctctacttccctctctacttcatccgctctgcgctccattttagaagactgttcagaaaccttaggaagtatggattcataatgccggattcttttggtattcagcttcccccgaagagattcttttatgatcctatggatctgcagatccggatatcttcggatcggagaagtaaagtggcagtaatactgagttgacaggccaaaatgacctgaactctctgtggtgtatctggcctgtttcatagatcttaacgtaaggcggctgatcagtgcctcctctggagttccctccaccttggtcagcagtttttgtatttccttcgggtggatctcatcctttttcagcttcagaacaatcccgaaattctccaaaaatgtccgcagcttctgaaccttctctccatccggattgtcatgtgtccggtagacaaacggtgtctcctgccagtaaaaattctctgccacagtctcattggccagcagcataaaatcttctatgatctttgtggctgcatttctttttgcaggaatcacatcgattgctttcccctcttcgtttaagagaatttttgactcagggaaatcaaagtccacactgccccgttcatgtctgcgttccctcaaaacatctgagagttctttcatctgctcaaacatctggacaaagtccttataacgtgtccgctcctgttcgtctccgtccaagaccgctgctacgctggtataggtcatacgctcgtccacaagaatgaccgtctcagcaatacggtggctctttaggttacccttttcatccagttccataatgcagctcaacgccagacggtcagtgcctgcattgagggaacagattccattggacagctgatgaggcagcatcggaatcactctatccaccagataaacactggttcctcttttcagtgcttccttatccagtgctgagtgttccgtcacatattcagagacatccgcaatgtggacccccaactgatatccgctgtctgtttttgtcaaggtaatcgcatcatccaaatccttggcatcttcaccatcaatggtcaccgtctgccaatccctcaggtccagccggccttccaaagctgatgtttccacaaaagaagggaccgcttccacttccttgacaatctcttccccaaactctgtagggatattatacgccttgacaatggacaggatgtccaccctcggatcgtctctgtgccccagaacttctatgatcttcccttcggggcttcttcgtatatctccataatccgtgatctctacaagaaccttgaatccgtccgtcagattcccgcactgttcttttggaataaagatgtcactttcaaatctttgattatccggaaccacaaagccataacttttgtttttttcaaacgttcctacaatctccttcattccacgctcaataatcttgatgatcctggcctctttccgtcttccgtttttggcctggtcttccgtcacctcaatcaaaacagtatcctcatggaaggctccgttcatatcattctcagcaatataaaaatcgctgtcttctccctccactgagacaaatccaaatcccttctgggtacaggtaaaggttcctgttaacgtctttttggtaaccgggcggaacttgcctcttttggaaacctcaatagttccctcatccacaagctccccaagaatctgtgcaagctccttgcggtcttctggctccacctgtaaaaggtatccgatttccttttgtttcataggctcataatgtttatcataaatcagatcgctgattctcttttttctttgattatataattccttttccataacttttccttttctttctgcagaatataggacaaacgatttccttgcgtatttgtgtgcataacgcccatagggcttttttattctgtagggagtttggaagaaccttcctacagaataaaaaaacacttcttaaacattatctgctttaagaagtgtttccattctaaagaaatctggaacaaagaagagctgctgtcacaaaaaagatcactgtaaaaacagtcgtcgcttttataatgcttccttctctggagcggcctttgttcttgctccaatacgtaccggagatcgttgatcctgtcagagatcccaatccggcttcttttccttcttgcatcaatactaatataatcagaacaatacacgataccaaaaacagtatagttaatgccattttcattgccttttcctcctaatgtttctgctcactgctgattattctagcacacctttccataaaatgcaaggatcccgcagtatcttaccttttcttaacagacagcactgcaaaaaacaggacaacgttgcaccgctgtcctgcttctcctgaggtctcttctccatatacgggaatattccatgtaagtccatgaaatactttatttatttttattataccgctgtacctctataaatacaatccatatcgtttgcaagaaccaagttcctcctcaatcctaagcagacggttatattttgctgtccggtcagaacggcacggtgcgcctgtcttgatcaacccgctatttgtaccaaccgcaatgtctgcaatggtggtgtcttctgtttctccggaacgatgggaaatgatggtcttataacctgccctttttgcagtctcgatggcatccaatgtttcggtcaaagtaccgatctggttaggtttgatcaggatactatttgccatatcattttcaatcccatccattagacgctttttattggtcacaaacaggtcatcacccaccagcaggatcttctggccaagacggtatgtgagaaccttccagcccggcgcatcttcttcgtttaatccgtcttcgatcgagaagatcggataatgctctgtaagctgttcgtaatactgtaccatctcctcagaattcctgcggatttcctttccggtcatctggctttcccctggaaagtagtacacatcttcatcttcgtcatagatctctgaagcagcgcagtccatggcgatcatcacctgttcccctgctttgtagccagcattttcgatggctttgaccaaaagatccagagcagcctcaggactttccagattcggcgcaaaaccgccttcatcccctactcctgtgctcaaatgattctcttttaagatacttttcagcttatggtaaatttcagttcccatcatcagtgcttctttgaaggtctcggctccaaccggcgcgatcataaattcctggaagtccaccgtattgtccgcatgctttcctccatttaaaatattcatcatcggtaccggaagcttacaagcaaaacttccgcctaaatactggtacagcggtatccccagtccgttggcggcagcccttgccgtggcaagagatgccccgagaatggcattggcgccaaatttctctttattctcagttccgtctgcttcgatcatgatctgatcgatctcgatctgattcagcgcattttttcccaccagacggtctgcgatcctgtgattgacgtggtttaccgctgtctccacccccagacctccgtagcgtttttcacggtcacgaagctctaaagcctcgaatttccctgtggaagccccagatggcaccaatgcagatccataatgcccatttgacaatataacctccacttccaccgtaggatttcccctggagtctaaaacttctcttcctataacatcttctattgataagccatatttcaacacactcacatcctttacaagtaattagtagtattttatccagatagatgaagatccatacattgaaatacaaaaagagagcagtgtgcatgaaaaaacacactgctcccttccataaaacgatttatttcactaataaagactttcctgtcatttcttccggctgctcaagacccatcatttcgatcaaagtcggagcaatgtcggccaaacatccgccttctctcagttttacaccttccttgtagtttactaagataaacggtacctgattgatcgtatgagcagtaaacggagcgccggtcacgtagtcaaccaactgttccgcatttccgtggtctgcacagatgaacatctgtccatccacctttttgatggcttccactgctcttcccacgcatccatcaacggtctcaatggcttttactgccgcttcgcagataccagtatggcctaccatgtcagggtttgcaaagttaatgatgatcacatcatactgatcggactcaatcgcttccacaagtttgcttcccacttccaaagcactcatctccggctgcaggtcataggttgccacagatggggatttaaccagagttctctcctctccctcattcggaacctctacgcctccgttaaagaagaatgtcacatgtgcatatttctctgtctcagccagacgaagctgttttaatccttgttttgccaagaactccccaaatgtattcttgatctcaactttgtggaatgctacaatcttgttcggaattgttgcatcatattctgtaaaacaaacgaaagttgtcttaaaatatccgtttggacgttcaaagctgtcaaacttgtcgtcacagattgctctagtaatctctcttgcacgatccgggcggaagttgaagaaaacaacagagtcattttccttaatagtagcggttggctctccattttctgtgataacagtcggtaaaacaaactcgtcattgacttcttctttgtaagaatccgcaatagcatccacggcagaatctttcatcacaccttctcccatgacaagggctttataggccttctccacacggtcccagcggttatcacggtccatagcatagtaacgtcctgaaacagtcgcaactttaccgaccccgatctctttcatctttgcttccagttcttcaacaaatccttttccagaagtcggagctgtgtcacgtccatctaagaatgcatgcacatatactttatcgatattatttctcttcgcaagttccagcagaccatacagatgagtattatggctatgtactcctccgtcggaaaccagacccatagcatgaagggcgctgccgttctttttacagttttccactgcctggagcagtgcttcgttttcaaagaaatcgccgtcctggatttctttagtgatcctggtaagttcctgatatacgatccttcctgcacccatatttagatgtcctacttcggaattccccatctgaccatccggaagccctacagccatgccagaagcatttccagggacaaacgggcaagtcttcatcagttcgtccataaccggagtgttagccgccgcaatggcattgccctctttattatcattcagtccataaccatctaatatcattaataccgttggttttttactcattgtaatctcctttatcttcattgatctctttttatagtccgttaatattataacgatttttgagaatgaattcaaccagggaattcatataaatcatatcaggtttttatattccctttttccatctacgattgcataaattatgacatttttatttgtctcatttactttgtagaaaatcagatgacgttctacaataagaacccggtatccctgctttttcaaaatagagtatcttggagtgctgcctgagcatggaacatcttttagctggatgacacgtttttctattttgtccaaataagccagggcaatcttgttgtcacctgaatcagcagcaatgtaaaatataatatccctcagctgatcttcaaatttatctgttcgtattatttgaaatgccatatcctgtcaccttgattggagggcagaccggatgccatcaaaagtttcctgaactggctcgagtcttccgtttttcacgtcatcctcggcttccgccaaagttctcaataactctaattcagccttcatttgattatattgttgaataccaaggacaaccgtatctccacgtccatttaccgtgataacgatcggctctcttgattccttacattgctttgatatttcactataatgatttctcaaatctgctgacggcctgatttctggctgcataacatcacccactttctctatagtcatattatatctcaatatgataataaattcaatctccataaacttacaaaaatcccgcagacactttatgagatatctgcgggaaattattaattcacttaaatcattatttgtaattcacgatcttaccaaagtctggttttaaagcagctccaccgactaatcctccatcgatgtcttcctgtgcaaataattctggtgcacttgcagcggatacagaaccgccgtactggatacgaatagcgtccgctgttgcctgatcgtatacttcagcgatgcactcacggatcgctttacatacttcctgagcctgttctgtcgtcgcaacttttcctgttccgatagcccagatcggttcgtatgcaatgacagctgtctttgcctggtcagcagtcacaccctggaatgcgatcttgatctgctggcgtacgaaatcgatggtcacaccctgctctctctgagcaagtgtctcaccgcagcaaacgattggagtaattccatgttcaaaagcttttaagacttttttattcactgtctcatctgtttctgcaaaatattctcttctctcagaatgtccgatgataacatatttcacacctaagtctgttaacatattcggagcgatctcgcctgtgtaagcgccgctctcttcaaaatacatgttctcagcgccgatgttgatgttacttccttttgcagcttccagtgctgccggaatacagatggccggcacacagaagacaacatctgaaacctcgcttgctaccaatggctttaattcattaactaaagctactgtctcgctaggtgttttgttcattttccagtttcctgctacgattgttttacgcataatgctatatcctccgattactttcaataagtgtacagtgcttatttatcgtttgccgctgcaacgcctggtaattcttttccttccaggaattccagtgatgctccaccacctgtagagatatgagtcatcttatctccgaatccgagctggttaactgccgctgcggaatctcctccgccaatgatagttgtagcgtcgatctctgccagtgcttctgcaactgcaacggttcctgctgcaaagttcggcatctcaaagcatcccatcggtccgttccatactacagtcttggcatctttcagtgcatttgaaaacagttctcttgtctttggtccgatgtcaagtccctgccatcctgcttcgattccgcctctctcaacagttttgatgttggcgtcatttgagaagtcatcagcaactacagtgtcaacaggaatcagtaagttcacacctttttcttttgccttgtccatcatttcttttgcgtagtctaagtagtcagcttccagaagggaatctccaacttcttctcccaatgctttcatgaaagtatatgccatacctccgccgatgatcaaagtatcgactttgtctagcaggttattgatcacagagatcttagaggaaacctttgctcctcccaagatagcgaccataggacgttccggattgttgaccgcatttcctaagaaatcaatctctttctgcattaaatatcctacaactgcagtgtccacgaactttgtaactcccacgttagagcagtgagctctatgagcggtaccaaaagcatcattaacaaaaacatcgcagagacttgcaagttctttgctgaactcttctccattctttgtctcttctgctctgtagcgtgtattctgaagtaaaatgacatccccgtcctgcattccttctaccgcagcttttgcattcggtcctaccacgttgtcatctgcagcaaactttacttcctgtcctaataactcgcttaatctttctgctactggcgcaagagataactccggtttcggttccccttttggttttcctaagtgtgagcagaggatcagctttccgccgtcagcaattaacttctttagtgtaggaagtgctgccacaagacggttctcatctgtgatctttccatcctgaagcggaacgttgaagtcacagcgcactaagactttttttccttttacgttgatatcatctactgatttcttgtttaacatgttctttcctcctaggatttcttataggaaggactaaaaagtcttcctatggaataaaaaaacggtccggtccaaaaagaccggacccgtttgagtctttataatattacagaatattacactgacttctgaggcttgtcctcacaaaagtgtagaagcttatgctaattctgcaaagtatttgattgttctaaccatctggcttgtgtatgagttttcgttgtcataccaagaaacaacctgtacttcatataatccgtcaccaacttcagtaaccattgtctgagttgcgtcgaataaagaaccatatttgattccgatgatgtcagaagatactaattcttcttctgtgtatccgaaagactctgttgctgctgctttcatagctgcgttgattccttcaacagttacattgtcacctttaacaactgctgttaaaagtgttgttgatcctgtaggaaccggtacacgctgagcagatccgattaattttccgtttaattctgggataactaatccgatagcttttgcagcacctgtagagttaggtacgatgttgactgcagctgcacgtgctcttcttaagtcaccttttctctgaggtccgtcaagagtcatctgatctcctgtgtaagcatgtactgttaacatgataccagactggattggtgcatacttgttcagtgcatcagccataggtgctaagcagtttgttgtacaagatgctgctgagatgactgtgtcttcttttgtcaatgtatcgtggtttacattatatacgatagttggaagatcatttccagctggcgcagaaataacaactttcttagctcctgcctgaacgtgtgcggatgctttgtctttagatgtgtagaatcctgtacattctaatacaacatcaacatctaattctccccaaggaagttttgttgcgtctgcttctgcgtagatttcgatttcttttccgtcaactacgatggaagattcttttgcttctaccttgtcgcctaatgcatatcttccctgtgcagaatcatactttaataaatgtgctaacatcttaggatttgttaaatcgttgattgctacaacttcataaccttctgctccgaacatctgtctgaatgcaagacgtccaatacgtccaaatccattaatcgctacttttactgccatctcaattcctcctaagtcttgaatgaataatttaatgttgtctgtcaattgtcaatctattgacaaacttcctttttattttaaacaatatgtccaaaaatatcaagcctattttagtatttctctcatgtatacaaaatcatacctttgtacaagattactaaaatcttttatttctcattttcatcgatgatataattggcaatattatctgcatagtcagaaatacgctccaaactggtcatcatatcgatgtagatcacaccagcctcaggtacacaggattccctctccagccgttcaatatgctgttttcggtactgcttctccatccggtcgacttcttcctctcccatgagagcctgtttcgcgatctccacatcatcattttcaatggcacggatcgcataatcaaaagttttaatgacttgagccgtcattttgtgcaattcgtccttagcgaggtctgagaaagcaattttatcgtcatgcttcatctgcatgaattctgcaatattctcaacgtgatctcccgccctctcaatgtcagaaattgtataaaacaagtcagtgacaatcttgctctgcttctccgtcagcgccagattgctgatctttaccagatagccagtgatcatggtttccagatggttgatgaccttctcgtccctgaacaccttgtccagctgtttttcacttggctgcggattcatggcttcttttgtgacgcgcttcatattcttcagcacaatatcacccatacgcaccacttcctttacagcattctccactgcaaaagaaggagtctccaaaatacgcggatccaggtggcgcaaaaccatttcttctacttcttcatcctcttcgtcttccggctcctcatggatgatcaatcctgacagttttaccaaaacattggcaaatgggaataaaagcactgtgacggacacattaaaaatagagtgaaagatcgaaatctccgtacttgtgatgtgctgcatagccagattatcaaacactccaaagaaaattgtcatgataattccatagatacctgcaccgataatattaaaggacaaatgaatcactgcggctctctttgctgttttattggctcctgcactggataaaagtgcggtgatacatgtaccgatattctgtccgagagtgataaagactgcggaacgccagttgacgatccccttcatggcaagtgtctgcaggatacccacagatgcagaagagctctggataaccgctgttaccactgctccgaccaaaatcccgagaaatggattacctccaaggatctcaaacgctttcgaaaagaccgggctgctctggtaaaccccgatcgaactggacataaaggaaagcccaatgaaaagtacaccaaaaccaacggcaatctctgccttttggctcagtttttgtttatttgaaaaagttacaataaatgcgccgatggccaggatcaaaggggcaaaaaattctggttttaatgcgcctgcccattcattggctgatacaagccatgcggtaatcgtggttccgacgtttgctcccatgataacgcctgctgcctgggtaagattcatgatcccggcatttacaaaacctacgaccatgacagttgttgccgaactgctctggatgatggctgtgaccaaagctcccactaaaactcctaaaaagcggttgttggtcagatatcccagaagctgcctcattttatttccggcggtcttctgaaggccatctgccatcacattcattccatagagaaacatacctagtccgccggcgaaggcaaataggttccctacatgatctaatgtactcattcttttttcctcctgtattaaacatccttagtttaacataaggtaattgttaatttaaagtaaaacttttgtaacttctctgtttttcatgtattttttttaataattatatataat

SEQ ID NO: 31 - DNA, 20235 bp, Anaerostipes rhamnosivorans
taaaaggacttggaaggagttttgcatggaaaaactacatggaatgggaagatagccagatcagtatgtgccaattttatgaggaaaacgaaatcccttgtagttgctatgatggttaaactgagatattaaaaaatttgtgtattgctacacatcaggaaaggagtgtttcaacatggcaagacagaaaaaggagccggaacaaaaatatattcgtcaaaatgttagcatggaacctgaacaaatgaaacagttgattaagtattgccaaagggaagatcgctcaatttcctgggtgatccggcaggcattaagtgagtatttggtgcgtaatggtgtgtagtgatacataccgaaactgagatttagctgtcctatcggctgtacggggaaattaaaaaaatggaggtataaaaaatgtttttagtaaagattttattgcttttggcaacagtggtaacagttatgatatttggaattaaaaaggacgtagatgataatggtcactatttcagcccggggaagaaacaactatttgcaattatcccgttaacacttttcttggttataacattttgcatggcatatgttccagcaaacaatgttggtattaaatggtccgcttttggaggtacgagcagtaaaacattaaaggaagggatatcctttaagtctcctttggataaggtatataaaatagaaacaactgttcaagagaggactatgaaaggggttaaggtgcagacaaaagattctcaatttgtggaatcaagaacagattttaagattactaagtcgttgctgcggagagttttcaatgttaagttcacagaatacagaagataagaaagagtttgacagcgcaataagtaaatgcagacagattatggcggtaagaattataagaaaatatagaccagaactttttaaaaaataagaatccaaaaagattaatgaattcacaatgtgaatagagaggggaatatgaaaaaagaaaagaaaggaggataggttccgcggacaatagatatcttcctaaaaaagagctatgaacaaaaaagaagaattggtcaacacattgctagtcaggttatccgtcaagtttactccggaacaactttcaacggtgcaacaaagcatgtatctggtgttaaataattatgaaattgatgatcgaaagacggaattaacaatctataatcaagacgaggatcacaagatgtataacatgttctttgtctctaaaaaggtatccggactctctatggagacattaaactattacggttatgtcctgcaaagattctttcatgagattcaaaaggatatcaagaatattgatacaaatgatatccggtactatttggctgaacgggcaatgagagataatatatctaaagtgacgcaagataacgagttgcgggtattaaaatctttctttaactggcagcaggaagaaggataccttcagcacagtccggccaggaaggttgcaaagatcaagcaggactatcgaattaaaaaaccgtattcagaaatcgaacttgaaaaattaagacgtgagacgacaaataaaagagatctggcaatcatagatgttctttatagtaccggatgccgggtatcagaaattgttaaggcgaatagggaagatatcgccggggacgaattaaccgtatatggaaagggcgggaaagaaagagttgtatacttaaatcctaaagccatcctaaccttgacagaatacataaatgacagagaagacgacaacgaagctctattcgttcatctgcggcggccgcatagcaggctgaagaaagaaggaatagaaagtatgatctgcgagcttgggaaacgtgcaggagtaaagaaagcacatccgcaccggttccgcaggaccgtagcaacaaacgctttaaacagaggaatgccgatggaagaagttcagcagcttttgggacataacgacatacaaaccacttccatctatgcaaaatcaacccaggaaaatgtaaaagcagatcataaaaagtatgtggtatagggaggacacaaacaatgacagagagagaaattttaaaggaagcagagaactactgtaataaaaagaagtgcaaggaatgtgattactggaaagctggacaaggatgcaggattaattatcctggaacaaaaggagacaaaaaacatgcctaaaccgttgtctgagaggaaatggggaattactaagcatgcattctaccaggcttatcattttgcactcagatacacggagttccgggatatattaaagtacaagacggacacggtgggaagccaggacatggacgggatgccaaagggaaatgggagtaatgatgcgacacagaatcttgcaatagttcggcagcaggcggatagaaattgccagataattgaacaaacagccattgaggcggatggtgatatctatcaatatcttctaaaagcagttacagaagaaaatgttacattcaaatacttaaagacagtaatgaacattccgtgcgaaaaggatatgttctatgatagacgtagaaagttttacttcttgctgtcaaaaaaaatatagaatgaccgtaatcagaatcctttttttatagtattatagtagtatcggaatagggaacagggaaggtagccaaacggcaacagtccttgttcctttattttgtggagtggcgcggattagtgaaagggtatcatgtcggtctccttagccgaagttataggttcgactcctatgtccgcaattttgtcaggaggataagatgctgaaaagttgtaaatattgtggaaggatccatgacagtaagttcaactgtgggaaaaagccacaaacaaataagaagaatacaaaggaaacaaagttccacagatcaagggtatggacaaagaaaagcataaggatccgggaaagagacgcttacctttgccaatgctgcatcagaaagatcgcgggaacagtagaggaacataactataaaaacatatcagtgcatcatattgagccgttgtgtcaagcatgggataagcggctggatgatgacaacctgattactctctgcgggtatcatcacgaagaggcagagaaggggaacataagcagaaggatattgaaacggattgtcgaggagcagaacagtagcagataagatgtagcaggtacccccctgggggtggaaaaatgaaataccatcggtcgtgtagaccgacgccctacctttatctataatttattcccacatcaggttttcaaatttgaaaagataggagggatattaaggccaacacccacaaagccaacaaatataattgagatggaaggtcgttcccatcggacaaagaaggaaatgcgccaacgcaagcaggctgaacaatctttgttgacaggggaagaaattagagaaaaaccggaagtaaaacagaataaaattgctcataaagagttcctcagaataaaaaaattactaaaaaatatagaaaaaaatgatgatttgtacggagttgtgatcaataggtattgtcttctttacgccgagtgttttgagtttgagcagaaaagagaaaagatgtttgaacagctctgcgaccttcaagaaaaagagaatgaattaattgaacatgaggaaatgacactcaaagaattttatgggatggaaaatagtatgcaaaaaaatttgattgctctggatcggcaggtgcaatcaaaaagaaaaatgctgttagaaatcgaaaaagaaaacattatgaccattgcatctgctttacgttcagtgccaaaaaaaacagaaaaaaagaaaaatcctttgatggaggcgctgaatggttcgtgacgggaaagcttatcagtatgcggcgtggtgtgtcactgaaacagatggaaaggtaccaaactatgtgaaaaaacaggcgaaggactggattaatattgcagatgacaatgatccggatgcttatgtcgatgaagaggcgtatgagagaatatgccggttattaaaaatcatgatccacccggatcttcgatgcagcatttatgatggactggaagattacgcatggttgtttattacggcaactctttgtacaaagctaagaaattctgaatttgactcacgattttatgtcactgcattattggaaattgcaagaaagaacttcaagaccttcaccagcgcagtgatatttattatattgatgcttacagaaccggatttttcccggttcttttccgttgcaccagatttgtcactttccagcgagctacaaaaagcaatcagaaaaataatcaaggtatcaccagcactatacgatgaagatgaatctgcatttaagcttttacgaagtcagatcatttgtaatttaaatgaaaacgaatacaccccgcttgcatatagcaaagacgggatggacggtaaacttgcaaatacattccttgcggatgaagctggtgcattggatgaataccccgtagaagctatgcgttcttctcagatcacattatttaacaagctggggatcatcatttcaacacaatatccgaacgataataatgtgttagtggatgaaattgacatagcaaagaaaacgcttgacggtctgactgatgaccgtcgatatttttctttgttatatgagccggatcaggagttacagaccggggatgcatggaaaactgatgatcgtgttatttaccaaagtaatccggtggcagtagcacatgaatatatttttaaagaacttaaaaagaaacgtaatctggcagttatctatgaaaataaaagggaaaattatttatgtaagcacagcaacattctgtacaaagggcttggaaccgaaggttatattgatgtacaaaaagttaaagaatgtaggatagaacaaaacttgaaattttggagaggtcgccgcgtatggctgggagttgacctttccatgacggacgataatacggcagtcgctatggtaacagaggaagaaggagtcatttatgcaaaagtatttggattcttgccagctgacaagattgaatacaagtcaaacaaggagcatgtcgattataaaaaaatgatcagaaatgaatattgttatgcctgcggagacgaagttattgattatggggaaattgaaaaatttatcctggatatcgagaagaaatttgatgttgagattgtccaaattggttacgataagtggaacgcgcttgcaacagtgcaaaaacttgaggcagaaggatttgaatgtgtcgatattaaacagcatagttctgtacttcatatgccaacgaaattattgaaggaaaaaatacttcagcatgaatttcagtatgaaagtaatcgtttacttgaaatcaactttcagaatgccaggtgcacagaagatacgaatttgaacaaatatgtgaataagaaaaaatcaagtggaaaagtcgatatggtgatttccttaatcaatgcaatctatttgatacaacaggatatgttgtatggaaatgatggatttatatgtcagatggcatgaaggaggtataaaaggaagttttttaaaagaaaggaacgggcggagcctgaagttaaagaaacaccggaaatgaacgaagctctgttaagagcctttatctatggtgttgaaatggatcgggaaaaagcgatgaacattccatctcttgcgggggcaattcttaaaatagcggatacagtggcggcaatccctatcaagctttataaaaggaacggtgataaaaatgaagtggtagaagacgaaagaacggtccttttaaatgaagataccggggatacattggatggataccagttcaaacatgcgctaataatggattatttcctgggaaaaggagggtacgcatatatcaataaaagtggaaggaagatagaaagcctgcactatgtaaaagaaagcaatatttcctttcgggaaaatgctgatgttattttcaaggattatcagatcatggtacaggggaatacatatgatccggaagactggatcaggctattgagaaatacagaagatgggatcaggggaaaaagtatcatagaagaaaataaggaatcgttgtcggtggcatacacagctttaaaatttgaaaaaaatcttgtttcaaaaggtggaaataaaaaaggatttttaaaatcagaacgccgattgaagaaagagcaaatggatgaattgaaagcagcgtggaaagaactctactcaaataatggagaaaatgttgtcattctaaatgaaggtatggacttcaaagaagcatcgaacacttcagttgagatgcagctcaatgaaaataaaaaaacaaatggaatagaagtttgcaaaattgtcggaactccgccggcaatgattgaaggaaaagccacagagcgagatgagaagatttttattaaatatgagatcaacaacgtcctaaaagctttggaaactgcaatcaaccgggcaatgctgcttgaatcagaaaaaggggaatattactttgaagcagatacagatgatctgaaccgaagcgatattgaaaaacgatacgctgcatacgggacaggcattgaaaaaggattcttgcaagtagatgaagtgagaaaaaaagagaagatgccacagctgggagtcgaatttataaaactcggattaaacgatggattacttgatccggttgcaaataaagtttatgtgttaaataccaataaaacgattgatctaaacaaattaagaaagggggaagaagaaggagagttgaacttagagaacaatccgtcctcattgacggatacgtcaatgcagtcgggagagatagcaggccaatcagggaccgaagaaccggagaaaaatttatagaacaaattgtcccaggagtttttaaaaaagcattagagcgggcagatgatgttgaaattttattgaaccacgaccattcaaggcgacttggaagtacaaaggaaaatataaaattatttgaagacaatatcggacttcgggcgattgcggagatcacggacgctgagatcgtggaaaaagcaaaagaaaagaaacttcggggctggtcctttggttttgtcgagaaaaaagcaagtgaagaagaaatgaaaacaggtctaaagcgaagatacgtggaagatcttgacctgaaagaggtatctttaattgacgaaaggaagcttccatgttacgtaggaacttcgatctatttgcgttctgaaggggaagaagtgattgaggagcgggccgaggagacagaggccgtatatgaggatttaagagctggagaaaaactggatctttcatcatacaaaaacagaattaaaaatttaggagggaaaattaaggaataagcagagaagaattgtaacaacaaaaaaaggaatccaggaaagagcagaaaacattaagggtctaaaagagcagagagctgcctatctggaagaattacaggggattgtagaaacggcggaaatagaagagcgtgcaatgagcaatgatgagcaagggaaatttgacgacctggaaaaaaagatagccgggattgatgcgacgattaaggcaaaagaaaaagttcgttctatgtatcctgagaaaaaaacagagcagcaggaacaaaaaacgggggaactcagtgtcgaagaaagagcgttcgttgattatctccgaggcaacgcaacagaagagcgcgcggaaaacttaacatttacggataacggggcagtcattccaaattctatcatgaataaaatcattgaaaaggtcgttgatatttgtccggtatatcagatgtcagatcggtataatgtaggcggaaatatttcaattccatattatgacgaagaaacaagttctattacaatggcttatgcggatgagtttacggaattgacttcaagttccggatccttcaagtcaattgatttatccggattcctggcaggggcattgacgctagtatcaaaaaaactgatgaataacagcaatttcaatgttcttcagaaagtcatagaatatatgggtaaagcaattgcgaaatttgtagaacatgaatgtctgatcggaacagcagataaagcagacggaatgaaaggggtaaaacaggtaataactgcgggagcagcaaacgccatcacagccgatgagctgattgatgtacaggaagaagtgccggatacgtatcaaggagaatgtatctggattatgaataaagatactagaaaggcaattcggaaactgaaggatgcagatggaaattatttattaaatcgggatgtatctgcgaagtggggttatactttgcttggaaaagatgtgtattgctctgcaaacatggaaaagatggaagcggggaaagatgcaattatctacggggatatgagcggtcttgcagtaaaggtaacagaagaagcatctatcgaggtgctgagggaaaagtatgcgacgatgcacgccgttggagtggttgcatggatggaaattgatacaaaggtggcagacgttcagaagattgcgaagctgaaaatgaaagcgtcataggaggagtctatggagattcgagcattaaaaaaattttgtggtaccatcacaatgtcaaaaggagaagtcagagaatgtgaagagacggaggtcgtaaaagacctactgaaagtcggatacattgaaaaagtgaggaaaacaaagaatgaaggcaaatgaactcacgccggaatacatagctgactatctaaaaattgacgatcccgaagaaagtgattttaaggatattgaaatatttcattccgcagcaatcgactacataaaaaatcagactggaattgatgatcaaaagatcaattccagcgatgatctgacagtagcaattcttgttctggtagaagatatgtatgataaccgaagaatgtatgttgacaaccagaacatgaatcgggtcgtggaaaacatcatttatcaatattcagaaaatttgatttaggaggacctaatgaagcaaattaatattggtaaaatgaacaaaaggatttttgttataagaagagaagaaacagaagatgcaatgggacagacggttcatcgtgaaataaagggaaaaagaatatgggcgactgtaaaatctattaggggaggagaatactatgaggcattaaaaattattccggagatctcctatgttatttacacaaggtacagggaagacattaaaacggatacaatccttgagtataaggggaagaaattagaagtgaaatatgttgcggatatagaggaacaacaccaaatgcttgagattcagtgcacagagtatataaaagaaggtgatatcagtgatctcttttgacttcgatggaattgaagaaattgaagaacagttagaggccgccgcaaaaaaattcccggatcttgcagaaagtacattgaaaaaagaacagtctgaatttaaaaaagatatgaagcaggagacatggaataaggtaaaaaagggaaccggaaacatagtaaaaggatttcgatttgacaagatatatcgtttcagagcggattttgaaacaaactttcttgcagagggaggaaaaaagaatcctcattttcatttgattaacaatggacacgagatggtcactccggtcagcagaaaagggaagaaactcaaaaatggaggtcagacggtcgggtttgttcatgggaaacggatcaaagagccggttattgcaaagtggcatgaaaaacatgcagagcgggcgaaacggatgttaaacaggatatgtgaggaggcaaataagtgatagaattaaaaagcataaagaatgcctatatcaagattctgaaaaagcaatgtccagaaattaaaaaaatatattcgatagaagtagaagaaggatataaaaccccttctttttttgtacgtattattccgcttattttcagagaaagagcaacaatcagcattgtaaaatcacaatgcatgattgagacaacgttcttccaaaaagacaaggatgaatctcaacagcttgaaatagccgaaaagattagagaggggattggagactatattgaagtttgtgaagagaagttaagagtcatggatactgaactgggatacaccgggaaagcacagaacatcatgcaatttacattcaatcttgaattttacgaggatattcgtcaaatcgcaacagaaccgaaaatcaaaggtgtaagagtaaaggaggaaataacacatgggaatgccacaaattagcatcagattttcagaactggccaaaagtgtaacagatagagccggttctaaaaccgttgggttaatcctagcagcaacaaataaagaaaaaattctaaaacttgctccgggggacaaggctccatcgggagtagataaaaatgcagttgaaatgtctttgattgggggagaacagaagccaaaacggacagttattgtttttgcgggagaaggatttaccgagatagataccgcgcttgaaacgctggaaagcgagcaaattgattaccttgcacttaacggaacggcagaaggggtttcacaaaaagttgtagattgggtaaaagagcaaagagcgcaggggaagaacgtaaaggcagttatgaattatgaagctgatcatgaagccgttataaattacgcaacagagaatacgacagttgatggtaaagattataccgcagatcagttttgtccgcgtatcgctggacttcttgcaggaacaccgatcacaatgtctgcaacttattttgtccttccggaagtacaggattgtacaagaatgaagaaagccgaaatggacaatgcaatcaacgaaggaaagctgattcttttctacgatggagaagatatccggatcgcaaggggtgtaaactcattaaaaacaataacttcagaaaagggggaacagcaaaagaagattaagattgtcgacattatggacaccatacgggcagatattacgcgcacggtccgtaataactggatcgggaaagttccgaatacatacgacaataagtgtcttttagtatcggcaattcaaaattatttggatgatttggtaaaacagagtgttttatctgcggccgcagtggaaattgacatcgaagctaacaaagaatatttagaggcagcagggtatgataccactgaaatgtccagcgaagagcttaaaaaagcaaacacgggtgacagcgtcttcctgaaagcgagtattggaattgttgacgcaatcgaagacattatcatggagattacaatttaggaggtaggaaaagggatagctacaaagaaaatcaagtaattaacggaacttggggtgaagtctggttaaatgaacaatacatggctgaagcgattgggttagaggcaaaatataagattacaaaagcagatgtaaaccagaccgggacactcacaaaaggaaagaagatcacggagattgagggaactggtacattaaaattaaataaagtgtcctcgtatatgttgaaactgttgcttgaggatgtaaaacaagggaaaatgccggatataacgattatttcaaatctaaaagatccagccgcagctgggaatgagcgagtaaaaataaccggcgtaagctttgatgaattaacgatagcggactgggaagctggaaaattaggtgaagagtcatatgcatttacttttgaaaatgcagaattgattgacgcggtataggaggagataaaatgaatttgattgataaattattacagattgataaaaagaagataacagagaagaaagaaaaaacatatgagtcaggcagaatgcaagaattaatcggagatccgaaaattacaatcagggaaattgatccggaaaggttatctgaattacagtgtaatgcagtaaacgcagagacaggtaaaccggatctgacaaaaatgtatgacattaacctgcttattacaacagaaggagtagtgaatccagacctaagggataaaggtcttcaagagcattttggagcagccactccaaaagatctggcaaagatgatatttaaaaatgaggtcatggagattgctgatgcaatttccgaattgggtgcaccatcagttaaggcggaaacaataaaaaactaatctatgaaaaagaagatatcagcatggggtatcttctttttcgtgatcataatattctgccagagcaacacatgaatatggggccaaatcagcaacaagtggtgtatgggtatctgctgaaagaatgcgaagaaagagaggaggcgcaaaaggagcagagtaattgatgcgacgctcagattagtcgataagttttcatcaccactgtcaaaggctgcaaaaaatatggagcatcagacggggctgatgcagcggcaggcaaaacagattcaaaaggcaggaaaatcaattcaatctgttggttcttctctgaccagaaaagtcaccatgccaatcataggggttgggatggcgagtggaaagatggctgacactttccaaaggaacatggggcagattaataccctgttagacaatacgagccatttacagggctacaaagatgcggtcctgcgaacatcgaatgataccgggctggggcttgatacaacagcgaaaggaatgtatcaagcaatttcaagtctgggtgatggagggaagaaaacagaaaagatatttgatgccatggctaaatccgcgaaagcaggtggagctgaggtaaaagactctgtatccctgatttcttccggtatgaaaggctacaatagcatttcagaagggactgcaaagaagatatctgacttggcattccagacgcagaaactaggcgttacgacatttcctgaaatggcgcagagtatgcagccactttttccgcttggaaaaagcttgaacgtgagctacgaagagctattcggatccatggcgacgttgaccggggttacggggaatacggcagaagtaaccacgcagatgaaaggaatttttactgggctgttaaagcctacagagtccatgcaaaatttgatggctaaatatggctatcaaaacgggcaggcaatgatcaaggcgaagggaatgagtggagtccttcagattctgaaaaaagaaacaggcggccagtccgataagatggcgaagttgtttggaaactcacgagccttggttggtgcattggccctgaccggttcccaatatgatacattcaatcagaaaacgaaaaaaatgaatgattcaacgggatcaacagagaaagcattaaaagcaattcaaacaccgctgagtaagatcagaaagtccgtcaatattgtaaagaacggaatgacggttttcggggaggctgtcttaaaggtagttgttccgccagcaacaaagctggccaataaggtaaaggacctatctgaacggttttccaaactgaatccaaagacacaggaaacgattgtaaaaatcgctatggtagcggcagcggtcggaccggtgattttaatgtttggaaaaatggttttttgggtagggaaatcatatctcgcatgggcaaaattgctcagaagcatcaatagatttggcgggattgccgcaatgattaaaagtccagctggtatcgtgattattgcgttgctggcaattgtaacagcagcagtcttagtttataagaactgggataaaatcagtgctggtgcaaagaagatggccaaattcgtaatatcggccatgaaaagtgcaggaattgatgtaaagcaattaggaaagaccgtaaaagcgatagcctctaatataaacagtgcatttaaaacaatcataaaaatattgaagagtttactaaaagctcttgcaccgatagcgaaatttatcggcggaacgttgctaaaaatcgtgaagctggcaatgaagttaatgatcggatatttttcgggatggctgaaatctacgctggatattatcaaaggtgttacaaaagccttttccggaattgtagattttatctccggagtttttacggggaattggaaaaaggcttggcagggcgttaaaaaaatcttttctggaatttttgaagcattgctgggaatagcaaaacgcccgttgaacgggattatcggtctggtgaatactgtaattggcgggctgaataagttgaagattaaaattccttcttgggttccagggaaatatggagggaaaagctttggagtgaatattcctaagatcccggctcttgcaaaaggtactcaaaattggaaaggcggtattgcacagattaacgagaaaggcggagaactcgttaatctgccgagtggtgcaaaagtttggccgcacgataaaagcatacaaaaagccagagaagaaggaaagaaatcaatcataattcaaaaactggccgatcagattatcgtgaggtcggatgaagacattgaccgtattgtggatgagattgtgaagaaactatcaaaagttgtagtatgaggaggaagaaagggaattttggttaaacaatggaagtgataaaatcaggcttgcagtcatcccgtcttcttataagatctcagacggacaaaacaatacaagcgtaaacgtacatcgaaaaggagaaataaatttacttggagaaaaggcactgagaacagttgagatcagtgcctttttccctgcaaaggaatatgacttctgccaatacaaaggatttaacacggatccatggcattatgtgaagaagattaaggcgtggaaagatggaaaagttaccccacaactcatgattacaggaaaaccaaatatcaacatggcggtgtctattgagagtttcgagtatgggcaggatgacggaaccgaagatgttagctttacgctcagtttaaaagaatatgtggtagttaaatatacgacacaaccgaaaaaaacaaataccaagtcgggaaagaaagtaaaaaagaaaagcaagacaaaaaagagatcaagtaagaaaataaaaacttcaacgtataaggtaaaaaaaggagataccttgtggggtattgcaaagaaaaagacggggaaatcatcgaactggaaaaaaatctacaagaaaaacaaaacgatcattgaaaaaactgcaagaaaacatgggaggaaatcatccagtaatggacattggatttatcccggaacaaagctggtgatagaaaaatgagcctaaaagttaaatggaaaggcaatgacattacagacataactacgaactatacatggtcaggcagtagctatcaagctgctagaacatttgagtttggaatggtgaatccggcaggagataagaattttaaaattccaaatataaaagtcggggatgttgtttgcttttatgatggagataataaattgtttcatgggaaggtaacaacaagaaccaggaccggagaagcaggaaatacaactatcacatgcaatgatttcatgattcatctgttacggagcaaggggacgtataaattcaaaaagaaaaaaccggaacaaattgtgaaactgatctgcaaagatctgaaggttaagacaacaagtttagcgaaaaccggggtaaaaatatcaaagatcttctttcaggaaaaagaatactacaatatgatccttgcagtttatacaaaggcatatcggaaaaaaggaaagaaatatatgccggttatggtaggggataagctttctgtaatagaaaaaggaaaactacttaaaatcgaactgaatcagggagagggaatcacagaatcagagtttcaggagacgagcgattctatgatcaataaagtcgcaatatataatgaaaagaataagaagattggcacgttaacaaacaagaaatggatgaaaacgtatggaacctttcaggaggcgattacggttgacaaaggcagcggaaaaaaagaagcaaagaacacactaacaggaatagaaaaaagtgcgtccattactgcgattggtgacatccggtgtatctcaggatatggattaaaaatacatgatgatgattctggactgaccggaaaattttacatcgaaaacgactcccatacctgggaaaacggcacgcacatgatgactttagaacttgcatttaaaaatatcatggatacccaggatggtgatacggaagataataagacaaaaagcacagggatactgaatggaaaaaaagtaaaagctttgttcacggcatattacccggccaacaataaaatggaaggtgggttttatgattgcaaagggaaaaagcttgatccctcaaaatatacctgcgctgcaccaaagtcaatttcatacggaaagcagattcaggtccttggaacaaaaacgtccagggacaaaaaagtgcataaggtcaatgaccgtggcggccggattaatatagaaaatggagtttaccattttgatttattaatgaagacaaaagcacagtgtaataaatttggaaagcgaaaagggtacgcaatcatcgggaatggaacgggatttaagcagacaagtgcatccggagggaaagcggataaagtaatctctaaggcaaaaacatataaagggaaagtccgatatgtattcggtgccgcaagcccgcaaagtggaaaatcggattgttctggatacacgcaatatgtttttaaaaaagcggccggaatcagtattgggagaacggcagcggcccaagcaactaaaggaaagaagatctcaaaaaaaaacttgaagaaaggcgatctggtaatcttccaggggacctataaggccgggccttctcatgtcgggatttatcttgggaataagcagtttatacactgttcaagttcaggaggggtgaagatcagcaatctaaacagcacatattatgtgaaacattggatgcagggaaggagggtgctgtgaatcaatatgaacagttattagagattatgaagaagatgggaagcaaaacaaatcctgaagagcttcagttggccgaagcagtatcttcaacagaaatacaagttggagggaacaaattagatacagacgactataagataaacgaaaatatcaaagatctgaaagctggggatttggtcttggtatataagataagagacgatctctacataatcatttgcaaggtggtgtgatatgtttccatttgaagaagatacagaagaagagaatattaatgaagaggaagaagagtggtatccaaaagagtatgaggtcgattttacgacaggaaagctgaccgggaaaattgttgaagggtcaaaggctattgctgtatggtgctatcttgccttattgattcctagatacaagtattaccagtattcatgggagcatggaagcgaattaagagaattaatcggatcgaataattcggacgaatacatagaatcagaagtcaatcgtttgatatcggaatgcgtgtcagagaatccttatgtcactgggattgagaaccttcagatagaaaggcaggaaagcacacttaaaattacatttgcgatcattacggactatggaaaggagggagttgatatcaatgtatgaagaaatgacatttgattatatcattgcacttatgatggaagatatgccggacggtctggatacttctgaagggagtttaatttaccacgcttgttcaaaatgtgcagcacagctggaagaagcgtatcttcaactggccgcagtatatgaaaatatttatccggatacggctgatctggatcatcttgtactctttggccaggaaaaaggtatttatatagaagaagcaacagcagcagttttcaaaggaaaatttaatatttcgatagaaatcggaagcgagttttccggagacgattatgattatatcgttacagaattgattgacgatataacacatacgtacaagctggaatgcgaagaaacggggacggatccaaacgggtggctaggagaattaacaccgcttgatgatattgacggtctggaaacagccgagttggttgaactcattgaacctggaagcgaagaggaggatgaagaatcatatcggatgagattactggacagttttgaaattaaaccttttgcgggcaatagagcgtactacattcaggagataggaaagatcgagggtgtaggaggagtaaaagtatatcgcagagagggaggaaccatccctgtgtatgtgatttcttctacgtatgaaagaccggatgatgatgtcatacagcgagtacaggaggcagtagatccattacaaaataatggagatggaatagggattgctccgattggccattccgttttgattaatggtgtagtagaagtaaagattaatcttgatatggcattaatttttgacgttggttttgcatatgaagatctgaaaagtcagatcgagagtgcaatttcagaatactttcttttgcttagaaaagactggatagaaaaagataatattgtagtaaggaaagcaggagttgaaaatgcaatatttaacattgaaggagtccaggatgtgacggaaataaaattaaacggtcttacttcaaatataacacttgatgaaaatgtaatacctatacagggggatatcatatgcagttagaataccctgaatgtgtgatagcgattgatgagatcaaggctgtttatgacaaaggtgacattatagaaaaaaaactgtttggacatatagaaacggctgatcaagatacgaatattacaacatctacggaaaatggaataaagagaagagaagaaatcctaaaagtgaatccaaaagatacggaatctcttgaggacagaaggttccgtatcttgattaaatggtatgacagctatccatacacattccgtgaccttattaaccgtatggataatctattaggtaaaggaaattatacgattgttatagataatgacactcaggaaatgatgtgtcgcttagaacttaaaaaacgagcaatgtatgatgagtttgtaaaattgctagaaacaatcgtgcctcttaatataaaaatggatattatgcttcggtaccggcaatggttagaatataagaacataacatggaaagatttgaaattaaaaacatggtatgacatgagaaatgaggcgaggtaatggcagaaaaaaagtatacagagcatttagagctgacacagcagtccgaagaggattttgtggatggcgaagagatatcgagaagttttagggtcttagataatacagtttggaaaaacaaaatggacatggaagatgtaaaacatgacctgtttccttcttatacagtagaattagagaaagaaacagatattccaataataaagagtaacattatctatggaaacagtaagtatttagcactgacggaaaacggatattgcgtatccgaaaatggtgaggcctggaatagccgtacatacgagaatttttccggagaatttgttgccggatttctctctgggaagtttattgtttgtggtccgcctgataagggtatctatatatctgaaacgacggaaataggagattggcaaaatgtaaacggtccaggggttgtaatcaaaggtatgaatgaagtaaacggacgttactttgtgattgatgaagaaggtcatttgttcgaaattttgaataatataagcacaccagcttttagccctttgtatgaatcttccatgtcagggattacggatataacatatggaaatggaacttatgtgatatctactacaaaaggactgcgtttttccaatgatgagtttagatcacttaaaaaaatatcaaataatggtgatgaaaattttatgaacttaaattttacaagtgtacggtatgccggaaaacagttccttgctgtcacgcaggatggaaatatatacacttcgacagatacgcgaatgtgggagcacacatcgtttttagacaaaacggtaacaagacaaatagaatttttaaatggattattctttatcatttgtggaagatacattttcgcaacgaaagacgggagagcagcaaaatcttttattgcatcgctagatgatatgactggagttgtaaatgcaaaagagaagattgctttttacgacaccgcatcacgtgtatcttatgtttcggtagaaaaaagtctaaaagagcaggtttccgaactaaatgcggatttaaatagtactgatttaaatttaaataagattaaggaatcacttccatacaaagtactaccaacaaatagaaaaataatagattcac

SEQ ID NO: 32 - DNA, 17555 bp, Anaerostipes rhamnosivorans
cgttaatatcatagaaaagacaagcatgcaaatggctgtcttctttattattgacttcataaaggtaacatctttatgaagtcaataataaagaagacagccatttgcatgcttgtcttttctatgatattaacgtcaggattagcggtaccgaaaaaagaagtaaaagcggcacagagtacatacagcggcagaatctggaaatcatgggtgaaactcagaaagtctaaatccaaaaagtccaaagtaatccgcaaaatctccaagggagaatctgtacaggtgcattacacaagcggtaaatggagaaaggttacatacaaaggcaagacaggatttgtcttaaagaaatatgtttatattaatacaaatgctccccggttaagcggaagcgcagaagaaaaagggcagacagttgcatcctttgcacagcgttttgtgggtaacccatatgtatggggaggaaccaacttaaacagcggggcagactgttccggttttgtcggaggagtataccgttcctttggatataaactgccaagaacatcttccgatctcaggagtgcaggaagaaaggtagcttataaggacaaacagccgggagatttgatctgctacagcggtcatgtagccatgtacataggtaacggcaagatcgtccatgccagcacaagaaaaacaggaatcaagatttctccaaaagctaactatagaaaagtacttgctgtaaggagaatcgtaacagaatagatcatttaaaatgtgcaagagagatcctgcacatttttttcatgtcataggaaattcctacggaacctcctatgacatgaaaaacgctccgcgaggatgcacacaaaatgcgtaaggaaatcatttgactacgtcaaatcgcatttggcgcgcaaagcggaacaagtcccttatgattgggggatttagggagttgaagcggacttgtccgctttgttctgtttaaaattaggaggagaccatgaaatcattgttatttgtcaacggatgcatcagagaggaagagtccaggactttagtgctggcaaggcagttccttaattgtctggaaggaaaatatgaagtgtcagaggtgagcggcctgagcattcctttggatctgggagctctcaaaaagagggatcagctggcggctgaatctaaatgggaagatcctgtttttgaccaggcaaggaggttcaaagaggcagacaggattgttctggcagccccgttctgggaagggacatttccggcagcggtgcacgcttatctggagcaggtctgtgttaccggatttacctttggttaccgtgaggacggaaaagcagaaggatactgcagggcagacagggctgtattcttttcaaccaggggaggaatttactctgggggagaaaataaaaaagatgaccacgctgaaaacttccttacatcgatcttccggatgttgggaataccaaggacagatacggtggctgcagaagggcttgatattatagggaatgacgtggatgctattatggaacaggctgctggacgagcaaagatgctggcagtggacttctagccagagcatatctgattcttttccagaacatggtcagatttacttgaaaaagggcgtaaaatgcggttatataaatatataaaattcaaaagacaagaagagaggcggcagtcatgttaaacgtagaacatttatcttaccatataacagaaaacggtgcggatacccagatacttaaggatgtcagcttctccgtcaacgatggggagatgctggtgatcaccggccccaacggcggaggaaagtccactatagccaagatccttatggggatcgagaaagccagtgccgggaagatctctctggacggggaagacattacaaagtattccattgaccagagggcggatgcagggatcggatttgcatttcagcagccaccgagattcaaggggctgacagcttccaggctgctttcccttgcagcaggtgagacacttccggatgagcgctgctgtgaattgctgagcagtgtggggctctgcggaatggaatacaaagagagagaagtggatgccacattgtcaggcggggagatgaaaagaatcgagattgccacagtgtttgcgaaggaccataaaatctgtatttttgatgagcctgaggcaggcatcgatctttggagctttgctatgctgatcaaagaatttgaaaagatccacaaagaaaacaaagcgagcttgatcctgatctcacatcaggagaggatcatccggatggcagaccgtattatgatcatacgggacgggcaggtccaggagatcggagcaaaggaagaggtgtatccgcaccttatggcggaagagtctgaagagcagtgtgcctgcatgcatgaatagggaggaatggacatgaaattagatcagataactgcaggagtgcttgaggccattgacggtcagggatttgtacagaagggcgcttataatttaaggcagaacggacaggccttgtgccatggagacagtgagaatatcaggatcgtaagaaaagaggacaagccggggatcgatatatttatcagcgggcagacaaagggagagtccgtgcatattccggttgtcgtatctgcctctgggatgacggatgtggtgtataatgatttttacattgaagatggcgcagatgtcctaattgtggcaggatgcggcatacacaatgatggggatcaggagagcaggcatgacggtatccatgcattccatgtaggaagccatgccaatgtaaaatatgaagagagacattacggggaaggggacggtaccggaggaagagtcttaaaccccgtgaccaagatttatgtggaggaagactctgtctttaccttagacaccacacagatcaagggcgtggattctacagtccgggaaacccatgtggagatgggagagggatccaagctgtatgtacttgaaaagctcatgacccatggaaaccagcaggcggtctccaatatggatatacagttaaacggacaggagagctctgcacaaatcatttcaaggtctgttgccaagggcacatccacacaagtcttccatccgaaggccatcggaaatgcattgtgccacgcccatgttcagtgtgattcaattatcatggatgaggcaaagatcagttccatccctgagatcaatgccaaccatgtggatgcacagatcatacatgaggcggccatcggacggatcaacagcgatcagctgatcaagctgcgcaccttcgggatgacagaggaagaggcggaagcagtgatcattgaagactttttgaagtaaggggttacaggtaagggggagtatcaggatgctggaatcaagggagaattatctcgaggcaattttgatgttgaagcaggaaatagggcaggtacgttctatagatattgccagaaagctaagttacagcaaggcgagtgtcagccgggcagtaggaattttaaaaaatggcggttatattaccgtggatgcaaaagggtatatctctcttacagctgaaggcttagcaaaggcagaggctatctatgagagacacaggacattgacgtcattttttatggagattgcaggggtaccggaacatgtggcagaagaagatgcctgcagatgtgaacatgtgctgagtaaacagactttccagggaatcaagatgtacttgaatgaaaatggcgtgtgctgaagaaaacgtgtataatatagatacagaaacttatcagtgatacaaggaggttttgacatggaattgacagcaggaatcaaaggcagccaggaaatgaccgcgagggcggaacactccgcaaacaacgtaggagacggaatgctggatgtattttcaacaccgtccatgatcgcactgatggagaagacggcatgggccagcatagaaccgtatttagatgatggggttgggactgttgggacacagatgaatgtcaaacatcaggcagctacgcccatcggcaaaaagatccgctgtgagagtgaactgatacaggcagacggaagaaggcttgtatttacagtgaaggcatatgatgaggcaggacagatcggagagggggagcatgagcgcttcatcgtgcagaaggaaaagtttcaggagaaagcacttcatagataaggaggtagcactatgggaagacttgaaggaaaggtagcgatcataacaggaggcaactccggagtaggagaacaggcggcaaaaagatttgcaaaagagggagccaaggttattatcactgccagaaggaaggaaaagctggaggctgtggaggcagatatcaaggctgacggtgggacagtgttggcacttcagggagatatatcggtccctgaggatggaaaacggatggtagatgcagccgtagagcatttcggtactttggatatccttgtgaacaatgcaggggtattggacgagggactgcttcctatcgacagagttgcggatagcgagatcgacaagatcgtggacatcaacacaaaaggaacgatgtattttatccgtgcggctcttgaggtcatgttaaagaataagagcggatcgattattaatgtggccagtattgctggggtaaacggaggcggtggagctgcttatgtggcttccaaagctgctgtgctgggtattaccaagcatacggctatgcggtgcgcaaaggatggtatacggtgcaatgccctttgtccaggcatgatcaagaccccgatgacagcggggcagacaatggagaccatggatccggatatgatgggtgccatggcgctgcactctgatctacagagacctgcctgctctgcagaggatgtcgcaaattcgattctgtttctggcaagcgatgaagctgcgccgatcacaggacaatgcattgtaatggattacggtgctaatctttaataaaacaggctcagggaccttccataaaagaaggtccctgtttttgttcattatacgtaaaagttattatgtatcaggcagctctgaacaatagcagatatggttttcccctttcttttttgcaaagtagagtgccctgtcggcattggaccacagcgaatgaaaatcctttccgtgttctgggtagaagccgatgcccacagatacatagatggggctttgaagattgaactttttctgataatcagcccaattgtggaaaaacagttccaacgattctgtaagcctttctttgtgtatggaagaacagggaacatagatgataaattcgtccccgccgatccttccgttgatttccttcggaaatgttttcaagagactcttggcaatggagatcagaatctggtctccgaatggatggccgtacctgtcgttgtaggttttgaaattatcgatatccatcgtgatcaaaatacctgagggtttcttttccatcagcaggctgatgttttcttccatacagcgtctgctcataagatctgtcagataatcaaactgggaataatatatattctttttgtctttctgactgaaatccggtacggactgatgaagatggagaagcttccatgagccgtctctgagctccgtaatcatactaaagcgcagatggcgggccggaagatatgttttgcaggagcgttggcttaacttgatctcgcccgtaacgagaaaaagattttctctaaggacagaagtttcataccattctttgtcaatggaatactcaggttcagaagaggaacattccagagagcagagaaactctactgaattttggcagtactgcccaagtcttataccgatttccgtcatgcggctgtccagaaaattgtcaattccatttttgttgttttttatcagataactgtgccagagagcccggcaaaacgcctctgcagatttcaagtttttcatctatctcaaccttccatacattaccaagcaagaaatgggcagaaatgtagacttttttcgtcgttaatgatattatttttttataaagaatctgaaataataaattcagcagattcacgggatttcccgataagtgtttttagtggaagtatctatatgccataaaaaacaagtgggtaaaaaagtctactttttttaccacattttctgagatcacaggcggccttcttctgccagccggacccatttaaaaaatgtattgtgggtggttccgagctgtttggcagattcacggccgcttattttttcttccttccaaagggcgtagatgcggtcgaactcctttggaatttttttcggcggacgtccgaagtttacccctttggccttggctacggcgattccttccgcctgcctttttttaatatgctcccgctctgtctgcgccacataggaaagaatctgcagcaccagatcagagataaaaactccggtcaggtccatggaattcttcccgcgggtgtccagcagcggaagatcggtgacaacaatgtctgcctttttctgttttgtgatgtttctccactgttcaatgatctcttcataattcctgcccagacggtcgatagatgttacaaaaagagtatctcctggcctgagctttctgagcagcttcttatactgaggacggttaaaatctttacccgactgccggtcaatataaatgctctctttgggtattttcatctccttcataactgcgagctgccgtcctatgttttgatccctagatgacactctgacatatccataatccatttctctccctccttctacaaaatgtgactgaaatattatcccataagagatagaaaaattgataaggaaacaattggaagcgtcgtgattgctcctgtattcttcctgtcccgtatgataagatggagaggaaacagaagcagtcctgatttacatacaaaaggaagggaggaaataaaatgatagaattgccggaagctctcgcaagagcagatgaactgcaaaaaacactgatgggaaagaaagtggaaaaggtgtatccgccgtcctcaccccataagttttgctggtttaacggagaggcagaagcctatgacggcatgcttagaggaaagcaggttacaggcgcaaaaggttttggaatcttcgcggagatcaactttgaaggcggggtcaaactctgcatcaatgacggagtcaacccgaggatttatcataaggatgataaggtgccggaaaagtatcagctgagaatcgatttttcacatggatctgtcctgatacttacggtggccatgtatggcgggatcgcctgctttgacaaagtctacgaaaatgaatattacgagatcagcaaaaaagggatttccccgctctcaccggaatttgatgaactgtattttgaggagctttttcattcagtgaaggctaataccagcgcaaaagcgtttctagccacgaaacagagaattcccggactgggaaacggtgtgctgcaggatatcctgttggaagcgggaatacatcccaaaagaaagattgggactctgtcagaaagtgaaaaggagaaaatctttacaagtataaaggatgtgctctctgaaatggtgcgccttgggggcagagatacagaaaaagacatctggggaaacccgggaggctataagactaagatgtcgaaacatacatacaaaaaaggatgtccaaagtgtggaagtgagatcaccaaggcggcttatctaggaggaacagtatattactgctctgtctgccagccgctttagacacagccggagaacgggtgaaaatgtcatgaaattaaaaaggttttcttcattatcggaagaaggcctttccagagccgactggaaataatgaagaaaaccttttaattgtttcgttcgtccccttcaaagaacagggccacggttcccggaccggtgtgagcgccgatgacggttcccacgctgttgatcactactttgccgttcagcttggggaaggaagcttcgatcaagtctgccacctgtctggcatcttcatagcaggcagaattggagagaaagcatttaccgctgtaatcttttccgtcctttgcgtgttcctccatccttttgacgatctctctgatggccctctttttggtgcggatcttcgcacggggaatcagatgcccttcgtggtccatattcaacagcgggcagatacccagcatggtcccgataaagccggatgtcttggagatccttccgccgcggatgtacgaagtcaggtctgtggaaaagaaccagtgatggatgttcagccggtttgagaccgcccactgatagacatcctcgattctctctctctggtccctcagatcggcggccagatctacaagtagtccatagccggaggaggctcccagagaatccacaagaaggatcttgcggtctgggtatttctccagcagttcatcctttgcgatattggctgagttaaaggtcccggagatgccggaagacagactgatgtgcaagacatccatcccttcttttaaaaacggttcaaagaattctatgtactcttctacgttcacctgggcggtattagcaagggcgccgtcctgtatttttttatagaactcatcaaatggaatgctctggcccagatcatccatatattccttcccgtccagtgttacatgaaaacatacataaggaatgttccggtgttgaaaatactcttttttcatatctgctgtcgaacagcagctcaatataaatcgtcccataggaatcccttttctctttctttaagtcaagttatctgttgctctctattatataagaaattccaggaattatcaaatgacccccggcgaaaggggggccagagggcttgttaataaaatatgaataaatattacgaaattattacaaaactctttacaatattattacgccgtgctataattcataaatgtaaacgaaatgtaataattacgtaataaattgaaagagattcagtgagggaataatgagagcaatcgcaaagaaaacagcaatttttgcagttgcatgtttaatgataacaggtacggcagcagcatcgcttccggaacaagaagtgaaggcggcctcgggatataccggatatattaaaggtgcaactacaagcttaaaacggagcaaatcaaacaagtcaaagactttagccaggattaaaaaaggaaaaaaggtcaccgtatattatacaagcggcagctggagaaagatcacttataaaggaaagactggttttgttccaaagaagcgtgtgaagattagcaccaaagcgccgaaactgcgaggcagcaaaaaggcaaagggaaagacagtagcaacttttgcccagaggttcgtagggaatccttaccgctggggaggaacaaatttaaatacaggagctgactgttctggctttacaagagccgtttaccgttccttcggatacagcattccaaggacttcctcatcccagagaaaggcggggaaaaaggtatcctacaagaaaaaacagccaggagatctgatctgttacagcgggcatgtggccatctacatcggaggtggaaaaattgtgcatgcaagttccagaaaaacaggaatcaagatctcaccaaaagcgaattacaggaaagtcgtatccgtacgacggattgtaagataaataccggcagatttatatcataccggctatagagaaaaagcccatggaatcattaccccctatcctaaacttacgattccagggctttttttccatgttcatataggtctagacatagtaaaatagggaatcaggagtgttatttttaaaaattatactaattgtactgatctaagtgcaaaaactgattttatgagatatatacaaaaccggtgaaggatattatgattaatacataagcaagatgcttgcttaacttcatcggttttattcattgaaggaggcctacgagatgaataatttacaggaaaaagtaatacgtagaatgattgatacgtatggatttttcaccactgatgaactttccgaaatgacaggagtttctgtcagcagcatcaaacactctttaagcgacatcagcagggaaatagaaaagtatgaagcgaaactattgactgcaccgcgcaaaggactgtgtttggtcgccacggaagaacaaagagagatgatcctggatgacctcaacgaatatgccaacaaagatccggaatcgttttactaccgcaagaattacatattagatacattatttttctatccggcaaaatacacgattcagcttttttcagaagagctgtgtgtcagcaggaacattatccagaaagatctgaagaacatagaaaattacctgagtgagttcaacttaaaacttacaaaggtcagaaaccaggggattcagatcaagggcgatgagtttgatctaagacaggcaattgttgattccgtaaataagaaatactggaaacatgcctatattgaaaaactgcctcaggatctggactaccgtatcagcaaacgagcctacaccttttttaccgaccattattcagaagaaaatattatgaaggtgcaggacagtctccagaaggcggaagagtttttaaatctagtttttgtagatatctctttttgccggctgacggaatatttattattgacaatcaaccgcatcggggaagggaaaatcctccaaaacgcgggcagccgaaagatgaccaagttagatacttcgtttctcgatgcggcgcgattgatattagatgaaattgttccccagaacggagatatggcatttgagcaccagtttctggcggccaagctgatggtcgcaaaaacatgtggacatggaaaaagacccagagatcgtaagtttgaagagattactctggattacctttccattgtgttggctgtgatgaagaaggaaaacgtattaaaagatgagattctaatcagtgacatcagttcatttttggaaaagatcacgatcaaacgggattataagttggtggaatgggatgacctgcacagggacgtgcagcatcagctgcaggatgtatatgcagcatgtatgacctatatttttgacattgaaggaaaactttctgtgatactgacccaagacgagattgcatggatcgcactgttgatccacaatgccatgatggacagcagagagggacatcaggcggtgctgcttactgccacagacgcccacactgcaaggtatcagaaagtaaagattgaaaacgcagttgaggggcttgagattacagacagtattcatatacgggactttcacccggaaacagtgaaagacaaattattgatttctacggttccattaaaggaaccgagggaaaatacaatcgaagtgacaaagcatatcgaccaggcggacatgaacaaaattgccttaagtcttgatgaattggatcatgaccagaaaatgacgcatgcgttggagacaacaaagaaaaccttcagggaatctttgattatgaccgatgtaaacgttatggaaaagcaggaagtgatccagcttgcaagtgaccttttatacgaacagggcttcatagaaaagggattcagccaagaggtgtggaaaagggaattaaaaagaccgtccactgtagggaggggcatcgtgatgccgcatatttacaaagactatgtaaaaacaagcggagttgcggtcataaggcttaagtatccgatctcatggacacctaatgaaaaggtacggctgctgtttctgatcgccatcgattttgaaacttcggaagagattctaaggtttttccagtatttttatgggatgatcggtaataaggagttgatcggacatctgctggatgcggaaggacctaaagagttttatgatattttaatgagtgaagcagggtaacaatggccgaaaggcatctaattaaaaggaggaagcactatgttagtaaacatgaaagaaattttagagatcgcagagaaggagcagtatgcaattccatgtatcaacactccgaacgtggagaccatccgtgcagtcattggggcagcggaagaattaaacacaccgatcatcattgaccacgctcaggtacatgatccgctcattccgatcgagagaatcgggccggaaatgttaaaatacgcaaaagcagcatctgttccggtttgtgttcacttagaccacggcagcgactatgatttcgtattaagagcattaaaagtcggattcccatcaatcatgtatgactgcagcgctcttccttacgaggaaaacttaaagagagtaaaagagtttgtaaaaattgctcaccctgctggaatcacagtggaagcagaactgggagttatggcctcaacagcagaggatactcacggagaggacgcagagactcgtgttctgaccaatgaagatatcaaagaattctttactgagccggaagaagcaaaagcgtttgcagaagagacaggatgtgacgcattggcagtgtgcttcggaaccatgcacggaatctatgcagagccgccggtattggatattgacagagtaagagaactccgcgcagcgattccagacacatgtcgtgtggtaatgcatggagcttcaggagtagaattctctcaggttcaggaagcaatcactgcaggatgctctaaagttaactactactcttacatggcaaaggccgctacaaaattcgtagctgaccgtgttgcagagacagacggaaagattgcgtaccatgaattacaggaagaagcttttgaattcatgaaaggatatgcaaaggacgtaatcaaagcgtttaagaacggaaaataggattccgtaaaagggagggaatacatttcatgaacagtgtggacttatccgaagtgctgctcgatgaaatggtaatccttgaccgggaaccgtttaaagacaaagatgacatgtttgatgtaatgaccaggcagtttgaaacggcagggctcgtttcagacgccggggcattcaaaaaagctttggaatttcgggagaccttggggccgacctatatgggcaacatgattgccattcctcatggaaaatgtaaggaagttttaaagcccggaatcggattctgcagatgtgcagagccattcatttatgagtctggcggggagtcaggcgaggtaaaatacatctttgtactggcgatttctgaaaatcaagagaatgattaccatttgagagtgttggcaactttggcaggatttctggctcacgacgagtttttggcattattagaaaaggctgaaagttatgatgatttgatccaggggatcaaggagctctagaaaaggagggacgtatcatgaaagttgttgcagtaacatcatgtgcgacaggaattgcgcacacctatatggcagcagaagcgatacagaagatctgcaagcaaaaaggttacaagtgcaaggttgaaaaacagggagcacttggaatcgaagacaagctgagggacagggatatcaaagaagcagacctgattgtatttgcaaacgatgtcggaattacaaaagcagaacgttttacaccttacaaagacaagatttttcagactaaaccacatgcagtgatcaaagacccaagtattatttttagtgaagtagaagagtagtaaaagagagaataaaaatatgaagggatggatgaaaaatgagagacgtagtagatgatattaaggaagcgtttttaaccggtgtttcatatatgctgccgtttgtagtagcaggaggtattttagtagctttagggttcttgctgggaggatatgatattccgaatacagtggagccgggaagaaattttgcctcaactatcttctggatcggtaaaattggtctgggaacattcatggtaccaatcttaggtgcatatgtagcattctcaattgccgacaaaccgggaatctgtgttggtatgtttggaggctggctggcaactgacccttggggcatgggatattcttcaggatttatcggagcgctgatcgcaggtatcatcgcaggttatcttgtaaatgcgttaaagaagattccgcttccgaacgctgtgagatcactgcttccaaccttgatcattcccgtaatcggatgtgcaggtatctgtttattgatgcactatgtaatcggaggacctttaggagctttaacatcagcattgacaacaatgttgaataacctgggaacaggaaacctggtactcttaggtattgttcagggatgtatgctggcatttgacatgggtggtccgtgtaacaaagttgcttacgcatttgccctggcatgtatggaaacaggaaactacgcaccgatggctgcaaactttgtagcttgctgtgcaccacctcttgcaatggcatttgctatgttagttgcacctaagaaattcacaaaggaagacagaacaggaatcgcaggatgttttgcaggggcattatgtatgatcacagagtttgcgatcccatatgctgcaaagaacttaaaatacattccttgtttcatggttggttctgcagttggatctgtgatgtcttacttatggggtattacaattcgtgcacctcatggtggagtattcgtagtatttgcaatgaataaagtaattccattctttatctgcttaattgtggcaggagctgtttcagctgcactgatcgtacttgtttcaaagacaaaaacagaagaagaattggcagcagaataaaaaataaaacaaaataggagaaataaaatggcaaagttatttgatatcatgggacatttcccatttgatccggacaaaaagaaaccgatgctgatccgcaaacaggattattctacagcgttatatccgccggataatgcgtttacatctgacaatacttttacaatgatcacaaccgataccttcatgttaggtatttatgagttaggaccgggcggagtatttgcaccacttgacatccatcctggagatgagtcttactacatcttgaacggaccggttgttcagagaagcggaaacggacagtttgcttacttagagaccggagagggtctgttcatgccggaaggcgcttggcactgctgccataacttctctgaccagaaggcaaggatcctttacttcatcactccaaaagcatggagcgagtctattccgccggcagtgattccgacagaagaagaaacaaaattctacaaaggaccgaacaatgacaatcttccggacatgagagacaagatccaggatatctcccgtcagggatgcaccgacgacatcggatgctggccggtagatcctacggaagcaagaaagacaggagctgtttacgcagtgcgtgactttgagaaattaaacaacgtacacggaacaactcatccgatgctgatgagattcatcacaagcaacgattacggacactttggcgagatgatccttccggcaggaggatatggaccgagatgttcagatcctgatacccatgcaggtgacggagcactctactgtgttgacggaccagttactgtaaaccttgtggatgcacaggaaagctttgttatggaaccggaagatacattcttccttccagcaggaactaaatatcagttagtaaactttgaagcgaaacctgtaaaggttgtcttcgcagtaacagagttataattacatttttaccagtactgagattgtttttctccattgccctaaggaagcctttttcgggccgcctggagatcatggggaaaaacgatcaaagtccggctgaattccccggccggttgttgtataatgaaaagaacaacacatggtgatctgccttgaaaagattctttgcggcatgccgtgaagaatctttttggcaagaaaggggataaacgatgagacgatacaaaggcattatatttgacttggacgggacactgcttgatacgattcaggatctgacagacagcgtcaatgaggtgatggaggaaatgggatatcctttgcacagcccggaggactacaagaagaaagtaggcaacgggtttcggaagcttgtggagagaagtcttcccgaagatgccagggatgaaaagaccgttgacagagcggtttctgcctttgtagaagcctacgaccgcaggtatatggacaaaactgctccctatgaggggattttagatctgctggcagtactttgtgaaaaaggtattgccgtgggagtaaattctaacaagagatcggactataccaatgcattgattcaaaagttttttgcgcatatcccgtttgtggatgtgtacggagagagagagggaataccgaagaagccggatccgacaggggcactagaacttctaaaacttatggggcttaaaaaggatgaagtgctttatatcggggattccgacacagatatgctgacaggaaagaacgcaggcctggacacggtcggcgtttcctgggggttcagaggaagaaaagagctggaagcatacggcggaacttatgtggtggacagaccggatgagatacccgggctgttagaaaggagcgagcaatgaaaatatctttaggatgtgacgaagcagcatatgacttaaaagaggcgatcaaaaagcatttggaggatgcgggacacgaagtggtagacaacggcgtggggcctggtgaagtggaactttacccggatgtggctgtgcgtacctgtgaaaaagtgaccagccaggaatgtgacaggggaatccttgtatgcggaactggaatcggtatggcgatgacagcgaacaaggttcctggaatccgcgcggcagtatgccatgacccattctcaacagagcgttctatcttaagcaatgacggaaacgttatgtgtatgggagcaagagtcattgcacctcagctggcattatatttactggacatctggatgggactgaccttcaaagacggaccgtccacagaaaaggtagaacggatcacatattacgaaaaacagttcagcaaataggaccaaacacttttaaggagggttttctatggattttaaatttggagtggatacatttatctgggcagaagcttatggggaggaacatctttggatcatcccaaaggcaaaagaactgggatttgaagtcattgactttgcgatctccaatccatttacatttccagtaaagcaggtaaaggctgaactggaacgggtgggtattgactgtgtctgcacgacaacactgacaccggagacgaacccgatctccccggatccagagattagggcagcgggcgtcaaggccatgaaaaaatgcgtggatatctgcaacgaattgggagcaccgatcctgggcggagtaaactatgcaggctggggttatctcacaaagaaaccaagaacacaggaagagtgggactacggtgtggcatgtatgcgtgaagtggctgaatatgctaaagaaacaggcgatgtgaccatctgtgtagagtgtgtcaaccgtttcgagacacatttcctcaacattgcggaggacgctg

SEQ ID NO: 33 - DNA, 16992 bp, Anaerostipes rhamnosivorans
ctaatcagaaggcatataaaatgtaggttgatgtgagtcaaaaggggctgctccacgaaagttatttaccactattggaggagcgcatttcaaaagcgcgacggaaatagtggtaaataactcatacctaataaattaaaaaaagatccgcactgcctttacaaattgcagtgcggaacttttttatgcctcggttccttcaaataatatttcgaattcgctctggttgatccgttctctttccagcagcagtttggcgcagctgtgcagaacttccatgtgttcttctataatagctttcgcctttttgtagcagtcatctacaatgtcttttacttcttcgtcaataatcgttgccacacgttctccatatggacgaggctggccgatctcttttcctaagaagacctcatcgccttctccggtgtcatagttgatcagtccaaggcggtctgacattccgtattcagtcaccatggatctggcgagctgtgtcacctgcttgatatcctgggaagcccctgtggtgatatcctcaaagatcagttcttccgcgatccttccgccaagactcaccataatgttgtggagcatcttgcccttggtgttaaacacattgtcattttccggaagcggcatagtataacctgctgctcccaccccggttggtatgatagaaacggtatatacagggcccatgtccggaagtacatggaataaaatagcatgccctgcctcgtgatatgcagtaatcctgcgctcactctccggaactacacggctcttcttctccgtaccgattcccactttgataaaggatttatcaatatcttcttttacgatatagcccctgttgtttttggctgcctgtatcgctgcctcattcatcaggttctccaggtcagcacccacaaaccctgcagtcgtcctcgcgatctgttgtaaatccacatcgtcgcctaacggtttcttcttggcatggatctttaagatctcttcccttcctttcacgtccgggcgtcccactcccactttccggtcaaaacgtcccgggcggaggatcgccggatcaaggatatccacacggttggttgccgcaataacgataataccctcgtttactccaaagccgtccatctcaaccagcatctggtttaatgtctgctccctctcatcgtgtccgccgccaagtccggatcctctccgccttgccactgcgtcaatctcatcgataaaaataatacatggcgcgtttttcttcgcttccgcaaacaaatctcttacacgggcagcaccaacgccgacaaacatttccacgaaatcggatcctgagatactaaaaaatggaacattggcttcccctgccacagcttttgcaatcagagttttacctgttcccggaggccccactaaaagaacacccttcgggatccttgccccgattccgataaacttcttcgggttcttcagaaaatccacgacctcttctagttcttctttttcctcggtcagccctgctacgtcatcaaatgtgaccttcggaccatccgggtttgccattttggcacggctcttcccaaagtccatcatctttccgccgccgccattctgcttcatcatcatgaccaggaaaaagacaaggatgccgaccatcagaaggttcggcagcagagtcgtgatccactcgccgctgtggtcaataggttttacaaccatctttttatagagatccggatactttgtctcaatctcctttaccgctgtatctacatttgtgatattgcagttcttgtaaacttcattttttaattctaccgtcatagtgccggtgggaacctctttgttttgtttcattgtgattccgacaacctggcccgcttttgcgtcctgacgaaactgtgcgtaattataattgtcttccgtgctgttcatcatcctggaaaaataaataatccccagacataatatcactgcaaggaacaaaaaattgctgtttccttttcttgggttcaacttactgtctcctctctgctactcttctgcgacaccaatgtatggaagattcctgtacttctgtgcaaaatccagcccgtatccgacaacgaattcatccggtacatcaaatcctgtgtacgccacttccacatctacttccctgcgctccggtttgttcagcagggtacagatctgaatactcttgggctttcggctcagaagcatgggctttaaatgattcagggtcttaccggaatcgatgatatcttccacgatcaatacttctttattttcaatgggctcatccaggtcctttgcgatttttacgattcctgaagattctctggaatctccatagctggacacagacataaaatcaatcgtcactgggaccgtgatccttttggcaagctcacaggcaaaaaatacaccgccctttaagatggcaatcaaatgaacttccttccctgcaaagtctctgctgatctgagctcccatttcctcaatcctcttgtccacagccttctccgagatcaactctctaatccctacttgttccatctttccgttttcctcctaattgtattccaattttaaatatcttttcgtttcttctgagaccttatacatttcgctcagccggtatccgatgatccagacgatccggcttccgtccgccacaagggggatatgatccctctcctctctcggaatcttctcatcaataaaataccggtttaaggacttgctctttccgtcctttgaaaaaatgagaaaatctccgggccgtcggtaccgcaattggatgtcattgtctattttatcataatcaatgattttggtaaaatctttttgtcccgttttttgatcccggtctgtctctgtaaggattaaatgtccctgcggtgtgtcctcctgctcatcctgggcggtctccacgatcagtcctccatatgtttttatacccctgagcccatacggaagatcgaccgattttcctgtctccttaaaagccagatcacataaactctgaatgtggaccttttcaatatccttctttttctgcgcagtcttctctatggcctgctttgccagaagcctgcgcaccggctctgcctgcttaagaaatttttccagatcaatgcggcagcccttttcatcctgttttacacagctggtccaggcctctgacagcagctcatctaaatacctgctccactcttctagttcctgcgacagtgaaaaaatatgctccaccgcctttgaattgacctgggtaagcaccgggatcacctgattacggatcttatttcttgcatacgtattatcttcgttgctggcgtcttccatccagctttggttcttttcttttaaatagtccaggatttctgccttggacagacacaaaagaggccggatcacatccccccggacaggctccattcccttcagaccctggatgcctgttcctctggccatccggtaaaggaccgtttccgcctgatcattctgatggtgggccactgcgatctttccgcctccgtgctgctccaataccgatctgaaacaccggtagcggaccagtcttcctgcttcctccaaggagatggacttccgccgggatatcccctgcacgtcttctgcaaaagttatccacggtacctgaagtctttggcagagtttctccacaaactgctggtcttttcccgcctcactgcggataccgtgattgacatggaccacttttaatgtgaggctatactcctgcctgagtccgcataaaagcaggagcagacatacggaatctgctcccccggagactcccacagcaatgaagtcccccttttgaatcatatgatgttgttgaatgaaactgtgtactttattcataatactactttatcattcccaatccacggattcaatacttatcccaaattccgaggccgatcatggtcatatcgtcctttttttcataaccttctgtgctctcaatcttttccatcagttcatccacaaatccctgaggccttgtggtattgatttgggtcatatattccatcagcagttccacaccgtttcctcccagggaatcaatgatgccgtcactgacctgaaggataaaatcttccgcctcaagcttctttctgtgtatcggaagttttttctccttcaatacccctaccggcaggctgtccagctggaccatctctacctgccccttgcgtttcagaaaacacgggcatgcacctaactttaaaaaacttccgatccctgcgtacagatcgatctgaatatagtccaaggttgagtacctctccttttccggccagaatacaaaaatcgactgcagcagctggatggctcttttttcgtccagccccacctcaagcagctcctccagggtctcaatgactgccttgctgtctttgtttgccgcatttccggtgcccataccgtcggagatcatagagacaaatctgtgattcccaaccgttcccatagaaaaattatccccatttttcatatcttctttctcagccctggaaataactccggtcaaaacgtgaaatttggtggccgcctggacacccatcatttcatatgtttccccgatggcctgtttaccgttgggcagaggctgcagtttttcctgcaggataacagagagccacctggccacctccttggttgtcctctctctgcctttctgcgcctttaaaaacaggtagatctgtttccctctcatatcatcctcataaatatacacttttttcactttcaaatgatgggctttcagccccttttcaatcctttcctgtatcggctgcactccggaaagctggtatttctgcgcggcaaagcttctgaacattctaccggcctctatgtactgctctccgatcattctgcgcatctcgataaacctctgttcgcaggcgtacaagaaaagctccctctcatagatggtgttgatttcatccacccactccttttctctctgacatctgcacacggagcggatattctgaacgctcaaacctccctgcttctccagcagagcgcccagcttgtcccggtcctccagggtaagctggcacttttcctttccctggcatagcatacattctttcaggatcgtactctctatgatcgttctcccgtctttcttttccagatcctctctctgttccgcacacatccttttccctatggtggtaagacaatgttccatctgtttcatattatatgatgtaatatcctccagttcattgaagaagatttcttccactggttcttttttctttataatcggcatcctggaccctccttcagctattaattatacaaggggcttatgtcacaatttgctgaaatggatcaaaggcgcacaattccctgtaaagaacccttgttattttcctccgggacagctaaaatgatcttacattaagttttaggaggtaacgaatggagtatgcagaccaagtagttcctattttaaaatcgtctcttcccttctgggaacacttaaaagaagctgagaaaaaaaacctctctcagtggtcccagctggtgcactatggaaaaggagggatgatccggtgccagaactgcgaatgcactggcgtacttatcattaaaagcggaagtgtgcggaccttcatgctctcagaggagggaaaagagatcacactgtaccgtctggatcagggagatgtctgtgttctttccgcttcctgtgtcctctctgcgatcacctttgaggtgcagatggaggctgtaacagaaagtgagatcgtccagatcagcgcaggcgcatattcagaggttgtagaccagaatatctatgcggaagcatttacttataagcaggccaccgagcgcttttcagacgttatgtggaccatgcagcagatcctgtttatgagctttgacaaacgtctggccatttttctccttgatgaaagcggaaagaccggctccgacacaattcggatgactcacgaacagatagcaaaatacaccggcagtgccagggaagtggtcagccgtatgttaaaatatttttcttccgagggacttgtaaagctgtcccggggcggagtatctattctagacaaaaaaggactaaaacagctgatcgcctgatgtaagcggtcactggaaaacaaaatgcagcaggggggcctggagcctgcctgctgcatatttttacttttaatgattttgaatcctcatattccccggatccccggcggccagattccccagtgacataagcacagggaatactatgaaacagacaatggagatctccgggaaaaatacggagagacccaggatcagcgaaggtcctgccagaaagaacagaaaaagagcaacaggccggactggaggccgtctgccgatctgcctctgctgtcggatctcatttccggccatttgattctctattccaagcgaccggaaaagccatcggatccccacatcgttcaagatatagatcacagagtacgccatggctggaatcaggctcgtgggaaattccagcagccatttcataaagacagggatcagtgacaataaaaataagtaaatcatatttttccatataaaattcacagatacctctttgatcccgccgaacagacggtgatgtctgttccactgcattcccacaattacaaaacttgcaaagtagattaagatagattttccgaagccaagcatttgtgatacatccatgctttttggcagaggaatctccaaaaccatcaaagtgatgatgatggcgataaacgcatcagaaaaactttcaatccgtccggaggaaacaccgtactgcctgaatcctggaacaatcctgtttttatgcaccaacgatcacctctttactctttttctttgaaaggatgtggatgtgggtgcggatgaggatggtgccccggtccgcggaatccatcgaaccgtccgaagccacggaaatccggtccttttcctgctggtcccctaaactcttcttttccttcaaagaacctctcgaaagcctcttccctctggcggcgcatctcttcaaaatcctctgaattctctcctagttcattttccaaggccgctgccacccgttccagatactccgcgagcttttctctttcttcctcagacaggcagtcaaagatcttataagtatccgccggagcttcattctcctcccgtcctttgtctgtgagccagttcagcacgatcctcttatcctgttcggaaggctcccgtttgatatagccgtttcgctcaagcttggcaagtagttcgtttagggaagaaacccgaatcccaagtatgtgcgacatatcttttgtgctgatcccgtccttaagctttaaaagtgacagcaaacgtccctgcccccgctccggatcagccattggtccggctgcatgatggtttttaaaatgacgtttctgcataagccattgtacttctgtaagttttctgtagatgatctcattcatatccataataaatctccttttttgaactgcattctatactaacggtacctgttaaatatattataacggtacctgttataaaaggcaagacttattttgataataacaaaaaacgtttccggaagtcttctatctgcatccgaaaacgtttttctattaagatcctataaactccaaagatgatttttcttatataaaaaggtttacatcggaattttcagcgtctcccagataggatgccactccagcaaattctacactgtctatgatctcctccttccggattcccatcacatccatggacatggtacatgccaccagcttcacgccgtttttaatggcctgctgcatcaaagtatccagagtatccacatgtttatctctcatgacttttttcatcattttagttccaaggccgcccatattcatcttggacagctttaatttttggtttcccctcggcatcatcgcgccgaacattttttcaatcaaggatttcttaaccttctggttctcgggcttcctcaaaacattcagcccccagaaggtaaagaacatggtcacaggcctgcccatggcagcagccccgttggcgataataaaggaggcgagagccttatccatatctccgctgaacactaccatagttttgccattggccgggttctgatccgctgatgccgcacatatatcacgcccctgggttcccttctggatatagacaatgttctgctttccttcccgctctttttttacaagtgtgttcccggttctctggcaccaggattcaatatctctcggaaatcccatgtctgtggctgacacctttactgtctccccatcatccatttccttcaaagtctcatggactttcatgatcggaccaggacactgcagtccgcagcagtccaccagacgaagttccttttcccctgctgttttgctcttttcttcctgtgtaatctctgccaaaaccggctcctctggcttctggtaatgcatagactgataaaagcttgttccgccctccagaacttttacgttggtaaatccgttctgcataagaatcctcgccgcgttgtaggaccgcacaccaatggcacaataggtaacggtgagccggtccttcggcagctcctcaagccgccctctcagctgccccagagggatatgatgagatcctgggatatgaaataccatcctctccatatcttccgtcacatccagaactgtcatgttctgttcccatccgtcctggctcatagtttcatccagctcctgataaccggtaaaagatactgtatgttccaaaacattttctgctgtgaacccaagcatatttaccggatcttttgcagaagaatacggcggtgcataggcaagttccagctcctccagatcatagaccgtaccgcccattctcatagctgttgccagcacatcgatccgtttgtccactccttcctgtcccacagcctgggctccgagaatctttccttccatgtcaaataaaagcttcaatgttaccggaactgcaccgggataatatcctgcatgagacttctggttgatcagcacagcctcataatccttccctcttgtctttcccatacgtttaagagttttttcatttacacctgctgctgccgcgctcagatcaaatacctgtgccacagaagtgccgagggtccctttgtaagttttctttgccccggcaatgttatcagcacagatccgcccctgcttattggccgttcctgccagagggatcatggacggctccttcaagacaaaattttcaacctggatcacatcccctactgcaaatacatttttagcggaggtcttaagttccccatccaccagaatgcctcccctggcattgagcctgatccctgcctgttttgcaagctcactgttagggcgtactcctatcgaaagcagcaccagatcagcctgcacttttctcccgctgtttaaagtaatgattgtattttgatcctcttgtccaaaagaagcaaccccgtctcccaacaggagctgtacgccgttttgttctatattttcatgtagaagctgagccatttcaaaatcgagaggagccatcacttgatcctgcatctcaatgatcttaacgtctaatcctgcattttttaagttttctgccatttcaaggccaatgaatcctccgcctatgactgctgctgtcttcggcttttttgtctccaggaccttcttaatccggtcagtgtccggcaccgtccatagcgtataaatatctggaccgtcaatgcccgggatcggaggcactacaggtgaggagcctgttgcaatgacaagataatcataggattcttcatacactgtatcatcgaccagattcctcactgctactttctgctgctccgtattgatccgtatcgcctcactctgtactctgacatcaatacgaaacttattcttcatagcctccggagtctgcaaaagcagagagtccctgttctttattacgtcccctacatagtacggcaagccgcagtttgcataagaaatgtattgcccccgctccagcaggacaatttccatggtttcatcttttctcctgagacgggccgctgttgtcgctccgcctgccacaccgccgatgatcactgttttttttctcatttattccacctcattatttttataaatctgttgttatcatatcttataaacagcggtgtctctgtgaccacatcacataactttgttttggtggttccttgtcggattttcccgaacgttcctttctttctgttcataatctattattacaacaagctttaaggagaattataaatgaattcaacgaattcaataaaggctgtccaggcgatgtcccgtccttttgttatctatacagatacagatctgaccggcactgccaccggtgatccggaagtgcgaagttattgttcgctcccatcaacctctgaatccagataccggctggataggcctgaccataatcaaatattccagtttcgcctgacccagggcggaacgactcgatatgcctactgccttgataaatttgccgacggcccttataatgacgtcccatacgaaagcgcgccttttgaaacgatctttcccgcagcaactgcccggcaaaagcagatgcttgcctggattctggcaaatacatttcctgctgtcactgccggtcagacgttccagctcacaggtacagatgctgcagcttctccggttctcgatgacaacgatgcatatgcggcagtccagatcgccatttgggtacttctcggccagattgcgccaagtgaggtaagattcctggactgtaccgatgacacggaacatccaaaatctgcacggatgcgccaggctgtcttgcagctgctctcgctggcaggggaatttgcggattccacagcaacacctgctacgccttctgttgtaaacccttcctgtcaatgcaggaacacgaagattgactgttgcaacaccggctctgcaccctctgcttctaacataccttatcttatttttgagggctgtcccgatgatctccgtaccatatgcggccgcctgttggtgggacctttcaagctccggtctaactttgttggaaaacccagcataactgtagaaccgttctgcgtctgccaggatggcttttccagctcttttatggatttttgcggaaatagtatcgaagctccgtcaatcggccaggaattctatattgccattcggtcatgccgtgcctatacatgttttactgtcactgcatcctttactggaaccatttccggagttctcttgatgcgtcctgtcagcacggcactcaattaccagccggtcggttcaacaatagaaaattatcaagtcactgtcaatgcttccatctgtctctgtacaggttcaccgggggaaacacatgaaaaaagttatgatcagagaggaatcaacataaataatagcaataataataataacaacaacaataataataacaatagcaatagcaatagtaactcaaacaacggcggggtatcatgcccacctcttaactgcggatactgctggcctccattctgttggcagccgccttattttcctgaaatgccttatccgccaaggccgccctatccaccagaaccaccttaccctccgagacctccttatccgccagaaccaccttaccctccgagacctccttatccgccggaaccaccttgccctccagaacctccatgccctccgaaaccaccttgccctccgaaaccaccttgccctccgaaaccaccttgccctccaaagccgccttgccctccaaagccgccttgctgctgtccggtaaaacctgagtgcccagaaaagccatcctgcagtcatacgaaagagcggttttaacttagaaaaatataccttattgtgcggagcacgcccatccgaggggtctaaaatgcagtgtgccctgtaggtatgacatgttccacatgatttccgttcggctcttagaatgcctcactccaatcatgtagaacatggacgtagtgtctgctggataaggatgacagttaaacagaaggtgccatcctacgatatcttcattgtcggaaggaggcctttccagagccgactggagataatggagaaaaactcttgacatttttaccactattggagaagcacatttcaaaagtgcgacggaaatagtggtgaataactagccccacattccattcattatataataaaagtaaactccacagttcgtactaagagatctgtggagttcctattttgttgctttcatagcattcttttattgttctaaatttagattgtaactttgaccttttttctgcagtaaaaatcttttatgattctccgcctcgtctttttggaatcttccaccttctgtcagatgggtttttactatgagataatcttgtccgtcttggtgttctatatcgagatgtatgttaatcgtcgttttataccagttattcagtttatgatatcctattgtaagcttgttttcctttctattctgtgcagccttgaaaggaacagaaacagtatattctccataatctgctttttctttcttcagtagaatttcctctttatagtcccaatactcgcctgtatcttcatacttgatcccattatggctcgactcatttttcattgcctgagtaaatccaggtccataattcatctttacttttacatagggaacatccagttgtatgaacaatatcatagctaaaataaagacaatgccaataataatgatcttggatttactcctcatatatttgcctttcttaatttctacagactattattcatgtctgaaatcatatacatcgttatgtatgtttaatgttattccattaatttgtatttcagagtcggaaagccatttgatttctgcatcctcacaatgatactcaaaatatatatttttctttacttttgtcttcttgtctgcgatttcaacaattacagaaaaatctaccgttgcattgtcaataccgtgatatgcgtttgcaatatagctgccatttggcgaatcaatgatcttaaataccactccctttgaaacagcctgagtatcccaggtaaaatgatagactgtccatcccaggaacaaaagtagtacaacaataaaaatccattttctttttctcatcagctatatctaatcctcataccgcttagcgaattccagaaaagtcttccacgaacttttttataattacacaaaaccgccattcacaagacatcccacaccgaagctacaaagtacaataagtcccctttgttttctgttctcttttcccattagaaaaaagactgctactaaaactaaaaaattgattccagctccacataatagatcttttccatacgatgacaatataaatgcacaatacatagcaggcagacttgagatgatcaccgaaataaaacctaatccctgataccaggacaaaaccaaacctatgacaaatagcattaacgcggtaatgataaggttaacaattccatagcttatatcggaatatctttgttctcctgagttaagtaaaaatcccgtcgcctaaaactactttcataataatcaacaattctgttcgaacagcagtcaagaatccaagacaaattcctaaaaataagattatcattatcttaaagcttacaaactttaaagattgactattcataaccattcccctttaagacctctaattcacggctgaatccctttatcttacaatatttcaacaaagttgtgctgccctttatgtctgggtcatttttatcgatgttttttatagttatatctttatctgcacccttttttaaatagtactctcaaagtttttcttttgaaacttctatacaatcatatttatcgtaaagaatatagaacaatatattggccccgtgactgtcccagaaattcacatctgccccgtacttcatcagtagttctgacattttatatacatcttctatttttggaagtgttgcagccagttccagcggtgacatctcaactgaatccacaacccgattcagatcttctcccttctccagatgttctttcactctgtcataatcacaaatcataatgtcgtataccagtgtgtgctccttgcccccataactgaccataacattacttgcctgatcattatccagaaagtcatcgtaatctctttgcagcataatgtatatagaaacactcatacctgcgatacaaatcagaattataatgacaatgatcagcagcgttttccaaatttttttatacctcataatatttttctttcattaattatatctgtttcctctcgtatcgtttttaataaaacattattttttccttatcatcttgttataaatgccacttttcatataattctttataggtatagcactgtgtatcctcgctaaaattttcatctgttatgacagctggacctaccggagattcatctgtaaagcacatcatgtaccctgctttcccttttctctcttctgaatcatataatatacccagattattaaatctttttcccgatttgtcggtgtcaacaaaaagtgtaaaatcgtctttttctgtttcctttttaaacatccatgtatagtcatgtcctgtcatcgttactacttttctgcatctgacctcatcaaattgctcattccttattttttgtttccatgatttatggatatcctccaaatcaaaaccaagtctcttttgatactgtttgaatgtgcacttctcttttgaaatcagcttttcatttttataccttcttaacacaccattttctaaatatcctctttccctttccaaatattcagcataatctgctatgatacttcctttatcagaaacaatatgtacgaagtattttgttttgatatccaaatagatagaatagttttcaggtaaatctcctgaagtaacacttttgataaactgtttctgtatagtaacctttttcttacccccaataccgggcgtgaacaaccataacagtataacgattatgaacgctgtgagaactgcaaacactctaagagtcctcattattattcccttcttctaacttcttattttccatggatgcaaattttctttatcttaagtaaccgtttaatgtagctattatcagagggaagtcaacggtaaagttcctcaccaaatccaaaatgtatatggattattattgcagtttttatcccgattctgtaatatcctatatttaatttctttccactattgtatatttctttttttccttcttccgctaatatttctttccattttaaactttatccccaactatctaactaatttttagcatacgtaaaaattcattatcatcatcagggtaagaacaaaagatcaaatcatctaccacaagcaaaggataccagctctcattgggcattttcatctttttttctttctcagaatccaagttataaatttggatatatctttcgtccggactatcccaatgggtattaaatccaataattactgatgaattataaacaaaatcataagcgttatcagaaaaaccatgttttattgtatcttttttaagacctctatattgatatagcctcatcttatgatctttgccatgacaaatataatataccttctcttgatttaccataatccctttatatcggacgacatcctcctcattttgtaattcatttttccatgcctgccctcgtacaattctatctttcagactctccaaatcaaccttatgaattcctacttccccatgttctgtataatacagattgtttttataaaaacagagatttctcacatcttctacaactttttcaagctttctgctcttagggtaaaatcgaaaaacattctcagacccatcatcttcggctaacaggtatattttatcgttatgtattttaattccatcaatagattcaatttctttctgttccttagcggaaagaagtcttttaatattttttccattcaaatcgcttttaaaaacacttctatcatgaacgtaatatagactgtcttttgttaattccaatccgccttcgttttcttcttctgatttattttccagccgtatgatggttgttcttttattgtcctttttgttgattcgagtgatttcctgtttttccgattcataaaaaacaaactggtcattttgaacgatggtagaggaaaaggcaggataataagactctgctattttgtcatgttttaaatcaaatcgatctgataaatgcttttgttccctctgacaccccacaaatattaaactgatcatcataaaaaatactatgttatttttataacttaaaattttcttatctacaatactgcctcctcttaatctatggaaaatattattaactataaaaagacaaatccctaaaaaaataatatatatcattctaatctcctattatctattcagattttttctatcataaaataaattgctctcatatatctttcagaataatttctttataaaaaataaagacacaagtagaattattgttacaactgacgtaatatttgcattacttacagaccaaagtagcaggttctcagattgtataactgtttctcttttattctcttctttcatgagtttattccgaatgatataatatcgaattttcctacatatgacttctgttttttctaactgaggtaaatttttttcttacattttgtcagttctgttccgtcatattcatatgtatccccatttgcacaatcaatatataatttattttatctaaattttatatctaattttcgattatccgcataaacactatactttcaagtattttgaagtatagaaaaaactcattttaccacgaatttaccacgattgaatgagccttgatatgacctataaaa

SEQ ID NO: 34 - DNA, 15049 bp, Anaerostipes rhamnosivorans
ctcccattatatgcaaagaccatacgataagtcaagtgtattctaggtttttttgttataaaatttatccatccatagatgttgtaggactctaaaaagttatgcacaatttgtggataacctgtggacaactatgtgaaatatttgttaatcctatgtttatatgtgtcgaaacccctgatatttcctagtgttgattttgtgaataaaattatccacagttttccacggaccacgtacattgtattactattgtacttataatatgaaagaaagattgaaaaaaaaaaccttttgttatacactagtaatagtgtatttttttaaacttatttagaaagaggtccgaaaaaatcaatgaagaaagaaatcgaagcgatctgggacgatgttctgttaaaactcgagcaggaacatgatatttcgagtgccgctatcaacgcctggataaaaccgctcaacatcaaagaagtgaaagacgatcagattgttttgtcattgaacagtaatttcgatgccagaggcatacattttattgaaagtaagatgtatgacttttatatttctctggccattcaggatataacaggtaaaaaatacgagatatcttttgttctggaagaagctgaaaagaaaaaatctccggcctcccggacagatacccagcttcaggactccaataacctaaatcctcgatatacatttgacagcttcgtcgttggaaccaataaccagatggcccatgctgcctgcattgctgtggcggaagctccggcggaagcatacaacccactgtttttgtatggaggcgccggactcggcaagactcacttgatgcactccatcgcccattatatcatggaaaataacagtaaactcaaggttctttacgtgaccagtgaggattttaccaacgaagtcatcaacgccatccatcacaacaaacaggaggagctccggaacaagtaccggaccatcgacgttctcctgatcgatgatattcagtttataataggtaaggacagcacccagcaggagtttttccacacatttaatgccctttataattcaaaaagccagattatcatatcctccgataagcctccgaaagagatcgagacattggaggaacgtttgcgtacccgttttggctgcggactgaccgctgatattcagcctcctgattatgagactagaatcgcaattttgagaaaacgcgctgaactggatcacatctatatagatgacgccatatttgactacatagcatccaacattaaatccaatattcgagaacttgaaggggcactaaacaagatccgggtatactccaagcttgaaaaacggccgattgaccttgatctggctaaaattgccctaaaagaccttgtagacaatgatactgttgtcaaaattacaccagatctgatcataaccacggtagctgagcattttaatatccagcctgccgatattttatcgaaaaagagaagccatgatatcgcgtatccgcgacagatctgcatgtacctttgcaagaagctgaccgatacttcttttgttaagatcggagaattccttggcaagagggatcattcaacggtcatccatggttcagagaagatagagaaggatttacaaaaagacaacactctatccacgactcttgacataatcattaaaaaaatgaacccttcttaaggcttgttcacatacttctgtggataacctgtgccttaactgttgataatttaaaccttaattttcggcttgttgataacctcaaagttatgaatgctttatccgtggcttcttaacatgttatgaaccttaattcagccttaaattaagccattttttagggttattcacaaatccacagcccctacggctaatactgcggattttaaacatatatttaagtatttttgaacctgaaaggagttatacacaatatgaaaatcgtttgtaatagaaccgaccttgtttccggtgtcagcattgtatccaaagctgtttcaaacaaaacaacactgcccattcttgaatgtatccttattgaggcaagcgcaggtaccatcacattaactgccaacgatatggaattaggcattgaaaccaatattgaaggtaatattttagaacaggggaaaatagcactggatgccaaactgttttttgagattgtcagaaaactacctgataatgatgtgaccattgagacagattctgattacaaggcaaccatcacttgtgaaaaggcatgtttccatattgttggacaagaagggtctgaattcccatatcttcctgagattgaaaaggaaaaaagtatcacattgtcgcagtttacactaaaggaagtaatcagacagacaatattttccatatccgacaatgaaaacaataaactaatgacaggtgaactttttgaggttgaagacaacaaactaaatgttgtgtcccttgacggccatagaatttctatcaggaatatagaactaaaagagagttttgactcctttaaagttgtcgttccaggaaagacattacaggaaattacaaaaattatttccggcgatgcagaaaaagatgttataatttatgtgactaataagcatatcttatttgaatttgatcaaacaagagttgtttcaagacttttagaaggggaatactataagataagccagatgctgtccagcgattacgagacaaagatcaccatcaataaaaaagaatttttggactgtattgaccgtgccagcctgttgatcagggaatcagataaaaaaccgatcgtcatcaacatcacagacaattccctggaattaaatatttcatctttctttggttccatggaggaaaatattttgatccagaaagagggaagggatattctgattggattcaacccgaaatttttgatggatgtgcttcgtgtcatcgatgatgaggagatcaacatctatcttgtcaatccgaaagcaccttgttttatcaaagacagttctgaatcctatatttatttaatacttcctgtaaatttcaaccactagaaaggaaattttaatggagcagatcaaattaagcgaagattacatcaaactcggccaggcactaaaggctgcggggcttgtgggttctggcgtggaagccaaaatcgtcattcaggacggacttgtctgtgtcaatggagaagttgatacaagacgtgggaaaaagttgtacggcggagaagtcattgaatatgacggacagtccgtaaaaattgtgaaatagttgggtgccttatgtatattcagtctttagagctaaaaaattatcggaattatgaccgtctgatcattgagttttcaaaagggaccaatatcttatacggggataatgcacagggaaagacgaatatcctggaggcagtatatcttggagctacgaccaaatcgcatagaggaagcaaagaccgtgagatcatccgtttcggagaaaatgagtcccatatacggattcatcttgtgaagcaggatatagggcatcagattgacatgcatttaaaaaagagcaagacaaagggagcggctattgaccagatcccgatcaagagatccagtgatctcttaggttttgttcctgtcatatttttttcgccggaggatcttagtatcatcaagaatggtccctctgagcggaggaagtttttagatattgagctttcgcagctggagaaaatgtatcttcaccagctctccagctataacaaagttatgacacagaggaataatctgctcaggcagctggcttttcagagagatcttttggatacattagacagttgggatctgcagctggttcgatatggatctgaggtgatccggtaccgtcagaaatttatagatgatctcaacaggatcatccgggagatccacaaaaaccttaccggaaaaaaggaaaagattgatttaaaatatgattatagtgtgaactatgatgagtttctgactgttttgcaaaaaaagagggagattgaccttaagtatgcttctacaggagcaggcccccaccgagatgatattgaatttcttgtgaacgggattgatatccgcaggtttggttctcagggccagcagcggactgccgccttatcattgaaacttgctcagattgagcttgtaaaaagacagaccggggagacaccgatcctgcttttggacgatgtgctgtcagaactggacagcagccggaagaattatcttttggacagtattaaggacattcagacactgattacatgtacgggtctggaagaatttataaacagtcatttacaaattgacaaaatgtttcaggtcaaatcaggtaaaattgtcagagaaaattaggaggaacgtatgggcactgagaaaaaaggagaatatggtgcggatcagattcagatcttggagggattggaagctgtacggaaaaggccgggaatgtacattggaagtacatccgccaaagggcttcaccatttggtatatgaaattgtggacaatgcggtcgatgaatcactggcaggatactgtgatacgatttatgtgacactgaacaaggataattccgtcacagtccgtgacaacggaagggggatcccagtaggcatcaacaagaaaaagggtgtctccagtgtggaagtcgtatttacaattcttcatgcaggaggaaagttcggcggcggaggatacaaagtgtccggtgggctgcacggtgtaggatcatccgtagtgaatgccctttccaactggctggaagtcaacgtccacacagacggaaaaatatataaccagcggtacgagaagggaaaagtctgctatccgctgaaggttgtgggagaaactgagcaaaacggtaccgtggtcagtttccttcctgacgatacaatctttgaggaaacagaatttgactataaaacactgaggcagcgtctccgtgaaacagcatttctgaccaaaaatctgaggatcattctgacggacgaacgtcaggaagagacagtacaggaagtttttcactacgagggcgggatcaaagagttcgtcacttacctgaacaaaggaaaagaaccgctgtatgatcaggtgatctactgcgaaggagaaaaagacggggtttatgtagaagttgccatgcagcataatgattcttataacgagaattctctaagctttgtaaataatattataacgcccgagggaggaactcatctgtccgggtttaaaaatgcacttacttctactttcaatgactatgcacgaaaaaataagctgctgaaggagaacgagagtaatctctctggggaagacatcagagaggggcttacctctgttatcagcatcaaactcggagagccccagtttgagggacagacaaagcagaagcttggaaatagtgaagcaagaggggctgtaaacagcattgtcaatgaacagcttacctattttctggaacaaaacccttctattgcgaaggtcatctgtgaaaaagcagttctggcccagagagccagggatgctgcgagaaaagccagggatttgaccagaagaaaaacggccctggacggattcagcctgcctgggaaactggcggactgttctgacaagaacccggaaaattgcgaaatatatattgtcgagggagattccgctggagggtctgcaaagacagccagatcccgcgcgactcaggcaattctgccactgaggggtaaaatcctgaacgtggagaaatccagattggataaaatcctcatgaataaagagattcaggcaatgatcacagcgttcgggacggggattcatgatgattttgacattgagaaacttagataccataagatcatcattatgaccgatgccgatgtggacggcgcccacattgccacgctgctccttacatttttctatcgctttatgccggacttgatcaaagaagggtatgtgtatatggcgcagcccccactttaccgggtggaacggaataaaaagttctggtatgcttatagtgaccaggaattaaataatattgtcaatgaaattggcagggacaacaataataagatccagcgctataaaggtctgggtgagatggatgctgaacagctctgggataccaccatggatcctgataagagagtgttgcttagagtgaccatcgatgaggattccgcttcagagatagatctaaccttcaccacactgatgggtgaccaggtagaaccaaggcgggagtttattgaagccaatgcaaaatatgtccataacctggacgtataggaaggaatataatatatggacgaaaatacaatctttgataaagttcatgacgttgatctgaagcagacaatggagaattcctacatcgattatgccatgagcgttatcgcagcgagggcccttccggatgtaagggacgggctgaagccagttcagagaagaatcctttatgcaatgatcgagctgaacaatggaccggacaaaccgcaccgtaaatgcgcacgtatcgtcggggatgccatgggtaaatatcatccacatggagacagctctatttatggagctttggtaaatatggctcaggaatggtccacccgttatcctctggtagacggacacggaaactttggttctgtggacggtgacggtgctgcggccatgcgttatacagaggcaaggctcagcaagatctctatggaactgctggcggacatcggaaaagatacggtcaactttatcccgaactttgatgagacggaaaaagaaccacaggttctgccatcaagatttccgaatctgctcgtaaacggaacccagggtatcgcagttggtatggctaccaatatacctccccataacttgagggaagttatcaatgcagtggtgaagatcattgacgatcaggtggagaatgaccatgtgacagatatggaagaactgctggagatcgtaaagggaccggactttccgacaggagccacgattttaggaaaagcaggcatcagccaggcgtaccgcacaggccgtggcaagattaaagtgcgcgccgtgacggatattgaaccgatggcaaacggaaagcagagaatcgttgtgacggagcttccgtatatggtcaataaggcaaggctgatccagaagatagcagagcttgtgaaagagaaaaaagtagacggaattacagagatcagggatgaatctgacagaaccggtatgaggatctgtattgaactcagaagggatgccaatgcaaatgttgtcttaaaccgtctgtttaaacatacccagcttcaggatacattcggagtcattatgctggctttagttgacaacgaaccaaagatactgaatctgtttgaaatgctcaattattatctggagcaccagaaggatgttgtgaccagaaggaccaaatatgagttgaacaaagccgaagaacgggctcatatcctggaaggtctgctcatcgcacaggataatatcgatgaggtcatcaagatcatcagggcggcggccaatatttctgaggccaaagtgcagttgatggaacgatttgccctgaccgatccgcaggctcaggctatcgtagatatgaggctgcgtgctctgaatggtttggagcgtgccaagcttgaaaaagaatacaatgagctgatggaaaggatcacagaattgaaagcgatccttgcggatgagagaattcttcttggtgttatcaaagatgaattgatcctgatccgtgataaatatggcgatgagagaagaacctccattggttttgatgtcaatgatatttctatggaggatctgatcccgaaagaaaataccatcatcaccatgaccaagctgggatacatcaagaggatgaccgtggatacttttaagagccagaacagaggcggaaaagggatcaaaggaatgcagaccatcgatgaagattacattgaggagctgtttatgactacgtcccaccactacatcatgttctttacgaatatgggaagagtataccggcttaaggcttatgagataccggagagcagccggacggcaaggggaacagccatcgtgaatctgattcagctgcagccggaggaaaagatcacggcagtgatccccatcaatgaatacaaagaagaccattatctatttatggctacgaagagcggagtggttaagaaatctccgatcatggaatacgccaacataagaaagacagggcttctggccattaccttaaaagaaaacgatgaactgatcgaagtgaagtttacggataatgaccaggatgtgttccttgtgaccaaaaacggacagtgtatcagattccatgagaccgatgcaagatccatcggacgtactgctatgggtgtgcgcggtatcaatctggacggagatgatgaagtcatcggcatgcagctgagctcccagggagaagcactgctgtttgtgtcagaaaagggtatgggtaaacgtacgatgatgacggagtttacgcctcagcacagaggaggaaaaggtatccgctgttacaagatcacagacaagacaggagatgtggtcggagtcaaggctgtggatgaagaaaatgaagttctgatgatcaccacggaaggtgttgtgatccgtatgggagtggagggtatctccatgcttggacgaaatacctccggtgtaaagcttatgaatttagatgacaatgtgattgttgcaagtatggcaaaagtccgggatgaggaagtagaagaagaaacagaagatccggaagaagagtaaataaaaaccgacggtcagagcatggcttatttcgcctgtgctctgacttcgtgtttcacagcagaataacggatgaaaatgattttggaggaaactatgagaacggttcatacagatgaaattatccaaaacatcaaggagatgtgcattgaggcaaacctttctctgtccgatgatatgaaatgccggctggagcatgcagccgggacagagaagactcctcttggaaaacaaattctttgccagctcagagaaaatatgaagatcgccggagaagagcagatccctatctgccaggataccgggatggcagtggtgtttttgaatatcgggcaggatcttcacattgagggaatggatctccacgatgcagtcaatgagggtgtccgccagggatacgaagagggatatttaagaaaatcagttgtaaaagatcctttgatcagggaaaatacaaaagataatacaccggcgattgtgcatatcgatatcgtttccggggataaacttgaaatattggtggcccctaagggatttggaagcgaaaacatgagccgggtctttatgctgaagccggcagacggcgcagaaggggtaaaaaactctgttctggaagcagtgagggatgcgggaccaaatgcatgtcctcctatggtcgtgggagtgggtctgggaggaagctttgagaaggcagcgtatctggccaagaaagctttgacgagaaatctggaccagaggtcagaaaaagagcatatccggatattggaggaggagctgctggaggagatcaaccagctgggcatcgggcctggaggtcttggaggcagcaccactgccctgggtgtcaatattgagacctatccaacccacattgcaggcatgccactggccgtcaatatctgctgtcacgtcaaccgccatgtgcaccgggttttataaggagagatggaaagatggataagtatgtaacagttccggcttctgccggagaactgaaggaactgcgggcaggtgattatgtttatctgactgggacgatctatacagcaagagatgctgcacataagaggatgtacgagactgtctcagagggcagagaacttccggtggatctgaaagatcagttcgtttattatctgggccccacaccggcaagggaaggccaggtgatcggttcggccggacctactacaagcagcagaatggataagtatactcctttgatgctctcgctgggtttaaaaggtatgatcggaaaaggaaagagatcccaggctgtgatcgattcgatgaaggaaaacggagctgtctattttgcggctgtgggaggagcaggagcactgctctcaaaatgtatcaaagaggctcaggtggtagcttataaagaccttggcactgaagccgtcaggaagcttagagtggagaatctgccggttattgtagttattgatagtctcggtaataatttgtatgagacggcagtgacagactataaagtaaattatctggaataatttttcattaaatggcaagaatataccagaagttcataaaaacttaaagaatttgaaaagaaatctttatagcatttttggtagaattatgtagaatgataaagatagattttctgatatctaaatcttttagagataaaaaggagacgatagaatgttaaggtatatttttgaacctgaatttaagaaatatggtcatgtcatagagaatacagattttactgagttgtttcaatatatggacaatgtacctccggtaaagtattttgaagagcagctgacagtaaaggaaatggaagagcttcctatatgccataagatccagtgtgaacttttccatgaactcccgatacagatcggatatttaaacgggcataaccacagaatccacggagtggaataccaccgatcaaaggtcatacatattgctgtaacagattgtgttatgtattttggactcagcgaggacattgggcctaacagtgaatatcacacatccaagatggaggcattttttgtgccgaagggaacagctgtggaattaaactgtggtgtcctacactgtaccccctgcaacattaatggttacggatttaagatgatctgcattgcaccgaaacatacaagtgaaccgttcaggaataaagtgcagactgaaaaggataagattctttatgccagaaataaatggctgatcgctcataaagaatcagagataccgggggcattttatggactgaaaggtgagacggaagcagtttaaagcaagatttggatagtattataaaaaggctgatttttgtaattgaacagaaatcagcctttttatttcatacgaaaattgttcttatgaaataaaaaagctctctaggtatgatgcttacgattgaatgattttgagagttggaacggacttttccattttgttctcattccctatgtggataatctttagaaaaatagaaatgtctgtgtatatctaaatttattcatttagatatactgttttatggtccttatatcagatcagtggtaaaataagaagtgataccactgttgttttgatctatgttatggagggaatgttatggacaatataccaaaagtcaagctggggattgctgccgtgagcagagactgttttcctatgtctctttcagagaacagaagaaagcttgcagctaaagcttatcgtgagcaatatggggagatctacgaatgtaatacgtgcattgagaatgaagtacatatgagaaaggccttggaggaacttgaggaagcaggatgcaatgctctggttgtctatctgggcaactttggtcctgagacggcggagactctgcttgcaaaggaattcaacggtcctgtgatgtttgcggcggcagcagaggagactatggagaagcttacagatgaccggggagacgcttactgcggaatgctcaacgcaagttataatttaaagcttagaaacgtacaggtttacattccggaatatcctgttggcactgcaggggaagtggcggacatgatccacgagtttgtgccggttgccagagccgtgataggtttgcggaatcttaaaattatttctttcggtccgagaccccaggattttctcgcctgcaacgcaccgatcaaacaactgtataacttaggtgtagaaatagaagaaaactctgaattggatttatttgagtcctttaaggcccatgaagatgatgaaagaattcccgatgttgtaaaagatatggagagagaactctccggaggcaataataagcctcaaattcttccgaaactggctcagtatgagcttactctgctagattgggttaagaagcataaaggttccagggattacgttgccatagcagggaagtgctggcctgcatttcagacgcagtttggttttgtgccgtgttatgtaaacagccgccttactgcgagagggattccggtttcttgtgaggtagatatctatggcgctctaagtgagtatatcggtacggcagtcagtggagatactgtgacacttctggatataaataatacagttccggatgatatgtatgtatctgaaatcgaaaacaaatataactacagccacagagatgtatttatgggattccactgcggtaatactgcctcaggaaaattgtcttcctgtgaaatgaaaaaccagctgatcatgacaagaaccttgccggaggagtcaacacagggaaccttggaaggggatattatacctggagatattacattttatcgtttacagagcacagcggacgcaaaattgagggcgtatgttgcccagggagaggtactgccggtcaagaccaggtcctttggaggcatcggagtttttgccataccagaaatgggccggttctaccgccatgtgctcatagagaaaaatttccctcatcatggagccgtaaccttcggacattttggtaaggcattgtttgaggtattcaaatatgtcggagtggacacaagagaaattgacttcaaccagcccaaaggaatgatgtatccgtcggaaaacccgtttgtataaagaaaggagtatgtacatgtattatataggtcttgatctggggacttctgcgctaaagcttctgcttatggatgagaaaggcgtgattcttaatatcgtatcagaagaatatccaatctcatttccaaaaccggggtggtcagagcagaatcctgtggattggtggcaggcagttgtggatggaattacagaattaataaaagatgtggataaagataagattcaggggatcagcttcggcggacagatgcatgggctggtgatgctggataaagacgaccaggtgatccgacctgctattttatggaacgacggaagaaccgtggaggagtgcgattatcttaattatgagatcggcaaagaaagattatccgaatatacggctaatattgcttttgcgggatttactgctcctaagattttgtgggtaaaaaagcatgagccggagaactttcaaaagatctgcaaaattatgcttccgaaagattatcttgcatatagactttccggggtgttttgtacagatgtatcggatgcgtcagggatgctcctttttgatgtaaagaataaatgttggtctcaggaaatgcttcatttatgcggtatccgccgagaacaagtagccgatgtttatgaaagttttgagaccgtgggaacaataaaatctgaaattgccgcaaaactcggacttccaacctctgtaaaaattattgcaggtgcaggagataatgcggcagctgccatcggcacgggaacagtaggagacggaaagtgtaatatctcccttgggacttcgggaaccatctttatttccagcagacagtttggggtagatgaccataatgccctgcattcttttgcccatgctgacggatactttcatttaatgggttgtatgctgagtgcggcttcctgtaataaatggtggatggaagatattatagatacaaaagagtatatgaaggaacaggaaaaaatagagacactgggggagaatcatgtatttttccttccatatctgatgggagagcgttctccccacaatgatccaaatgccagaggaacctttctcggtatgtccatggataccacaagagcagatatgactctggcggtactggaaggagtagcatttgctatgagggattccttggagattgcaagatcgcttggaattaatataaaaaggacaaccatatgcggaggcggggccaaaagtcccctgtggagaaagatcattgcaaatgtgctgaatcttgaagtagatattatagagagtgaagaaggccctggttacggcggagctattcttgcggctgtgggatgcggtgcataccaatcagtggaagaagcagcagacaaacttgttaaagtgataaatacaatcagtcctgaaaaagaactagctgaaaagtatgaaaagaaatatcaggttttcaaaacaatttatccttctttaaaaacaatctatccgctgctttagagatttattataagaagaaacgaatttctgaggtccagatgagtccccagaaattcgtttgtttctaaatgtacgaatggcagaagatgtacagaattagtgaaaaagagatactaatactactatatatagtgatacagaatattattccaattttatttaaattcttttattaaatctattgacaaagagttgggagtttgataatatattcaagcgtcacatgaagacgcaatatcataacataaatcgtttaggcgcttttggagaagtactcaagtggctgaagaggcgcccctgctaagggtgtagaccgtttgcgcggtgcgagggttcaaatccctccttctccgtttttataaattcttaaaaaagaaattataaaaaataaaaaaagttcttgacacacgggaatgaatatgatattctaatatagctgtcgcaagagaaaacgacaaaaaacgacagtcgaacattgacaactaaacaataagacaaccttgaaaattctaagagattttcagtatctttttgaaaaagatacaacggacgttctttatatagaacagtaagaacaaggataagaaagctagcgctttttagatccaagattgaacatgagagtttgatcctggctcaggatgaacgctggcggcgtgcttaacacatgcaagtcgaacga

SEQ ID NO: 35 - DNA, 12688 bp, Anaerostipes rhamnosivorans
tcttagaatgcctcactccaatcatgtagaaaatggacgtaatgtctgctggagaagggcttctgtcaaaaaggagccacttttcgaaagttattcaccactattggaggagcgcatttcaaaagcgtgacggaaatagtggtgaaaaactatcgtaggatggcaccttttgtttttataaatttcatctattctctaacgaactgtcagtaagcctgaacgaatatgtaacgtttaaagaaaacacacaaaacgtaaaatgataggagtaaaaggagccactttacgaaagttatttaccactattggaggagcgcatttcaaaagcgtgacggaaatagtggtaaataactcatgttaaaagaactgccatacagaatttatatggcagttctatacacttattttaaatttagcttatatcctcttttgctctcacaatcgcctctgccatctctctgatgcgttcagccggagaaggtgcattcagaattcctgatgttccccctgtgccgtccgcgcctaacctgatcacattgtagcagtcgtctgctgtgctgacgccggatgcaaccatgatctgaacatctgggtttactttgcgtacctcctggatggtctcgatcgtataagaatcatcggctacatgcccagttccgatcaggtccgtgggctctgccagtacgatatccggattcatgcatgccacagctctagcttccgtgatagaatctgcacaaacaatcgaggtcatattaagctcggcagcccgcaggatacatttgtataaatcacttaaggtcttgggattttccgcatggtttaaaaatactgcgtctgcccctgcctcttttaaagattccggcagcacatgccccattccccgtcccggtgtcagcgggtccatagactgtacacagacaataatattttcggtattttcgcgaatcagacggacatctgcatacgggcaggtaaaaataatcggaagtccggtatcttttgccacctgatctgcctccttagctaaggaaagactttcttttccgtataaatatgattttggattgacaaccaaaaacggtgattttgttttactcatgttgttcctccttactcaccgattaccacgactttacattttctttcccgcggacgtgtgcggtcaaaatctacaaaataaatatatcccgtaactcctactcccagctttccttcgtccacttcaaaggtctcgctggaaccaaggattgttgagcgcagatgtgcgtccccgttaaacagcgctgtcctgtcccctcccggaagccagaagtccacatccggccaagtctccacttcctcgtagtgcttttcgccaggatagttgtactggtccgcgctgacatggtcaggaatgatcgctgaaagagcattgttcagatcctcctgtaggaactcgtcaccgttttcattataatcatggacaaattcctcaaaaaatacggaacaggtcgtgtgtggtgagatcactgcgcagagtccattttgaattccgctctcttcaatgatccttctcacatcctcagtcacattgatatatgtaggggtcttcccatgagattgtacattgatcgtttctttatatactgccatttctgatttccctccatatcatttcttttgaaatactttgatcgccttttttacatcttccttgaccgcctctgtggccgccagggacatagaatcgtaaaacagcggctttgtttcatcttcccagtattctttggaagcctttccgcctgccgtgttcatgtaagtataatagttcaccttgcagatgccgttttcaatggcaatcttgtaatcttcctctgataccccggatcctccgtgcataacaagaggcaccttggctgcatccctgatcctttttacccgcggcagatcaagcttcggttctgtcagatataccccgtgggttgttccgaacgccacagccagacagtccactccggtcttctctacaaattctctggcgacctcaggatctgtgtaaatatcatctagattctcatagtcgtctttgttatcagaaccggatccttccccctgtacaacctccgaggtgaagatatgtcccagctcagcctccacgctggcgccaaccgcatgggcgatttttacgatctccgctgtttcctttacattgtcctcaaaacttttggcagacgcatcgtacattacggaagtaaagccgaggtggagtgcctgcacacatcgctcaaaactgcttccatggtccagatggagtgccacaggcactttggcccgctttgcgtagtatttcaggatcggcccgatctcatctaggtcgatgagatcgtcgtgactctgtgcgtgttgtaagataaccgggcagtttagctcttctgctgcctgaatgatcccccgtatcgcctccagtgtcgtgccattaaatgcgccgaccgcttttttctctgtttttgcctgatctaatagatcttttaatgtaactaacaattgatatcctcctgtttcaatgacttcacgcttatctatacccaaaagggcatcccgtgttttatgccctgtgtctatatgctactgtttcccaagttttctcaaacgctctcttccctgggatcttgccttggatacgagagattcagggttgacttttgcgtccaggtcataaaagaactcttccagctccttttcaccagaaaactcagatatcctgacccagtaccttcctttcaggaggccgccgttgtcgatggtcatatacattctcgtattgcccgccaaaggccgcatgctgtatttcctgatctggtttatctcatatttatggcttctgccataagcgcaaaactcaatggatttgtctctgtcaagcaggacctccgatgggttgctcagagacacaaaaacgttccagacattataaacgcacagaccaaggaccaacaaatacagaagctggtgtcccccggcaaagaactggaagagacaaaatgctccaatggctccggtaaaaattccaggcagcgtcatctgtatgaaaaaatgagatggttgatatagatagcgtttcatcattttttacctttctttatgcgtcagcatgtaattcttttgcttccttgatgatacgtttccggttcatcagtgccagccccacggctattacaactgcaatgataactcccacagctccgatggaatgggcctttacaaggatccatgacaacgggttggctccgtcacagattgaggagatggtcgcagccccttttggaatcgcaaagttgatagattttgctacggcagtgatggatggtgcaaggtctgtggaaatataaagtcctcctaccaggcagacaatacctgtgatcaaagcacggaatccatttcctcctaccaaaggcacgatcaatacaaacatatacggcagaacagataagtctgtcatcggaagcactgtattacccggaagtactactgccaaaaatactgccagcggaactaagatcagggaaacagtcagacacactggatgtcccactccaacagcggagtcaagtccaatataaatctttcctctgtttgcaaacttagatgatacaaattcctgtgctgcgtcagagattggcatcagaccttccattaacagagctgccatctttgggatcagcaccatgacggcacctagggtgacaccgatctgcagtacactctggagattattacccgccagtgctgcgatgacgataccaaggactgttcccacaagcatcggttctccgaacaccccaaaacgtttctgtagtttttcaatatctacattgatgttttttactcctgggatgcaatcaatgatcttatcaacaacaattgcaatcggtacaaatgccgctgtaaaaccatggggaatggatactcccggcattccaagggtctcctcaacttttggcgccgtatagtcaccgataaccataacgatgaccatgttgatgatcgctgcgatcactccgtaagcaaaatttccggtcagcgcatagatcagggaacctgtaaatgcgaagtgccagtaattccaaatgtccacatccagcgtctgtgttgtatttgtgagcagcatgacaatattaacgatcaatccgatggggatgatgatcaggccgatggtagtaccaaaggcaatcgctgacgccgccggccagccgatatctactgtagaaagtgccagtccgaagcgctgagccatctgttgaactgctggtgccaggttttctcccatcagtccagtaaccagattcaacccaataaagccgattcctacggtcaggcctccgcgcagggcctttccaaatttagcccctaatactacaccgatgatcgtcaagatgatcggcatcatgacactggcgccaagttggttaatataactaaatacatcaataatcgcttgcataataatcctccttttttatcctcttctccttattacttctgcatctcttccaagatagaagcatacagcttatctactccaactccggttaacagtggtagtccagccaatacaggacacttcacatcgccgctgactaacgtagtagaaacacaaaaatcaacgtttccggatttctcaacgacctctgaaacctggcattgttcgattttgtattttcccgcaaaaccgtgttcgtccaaataagctgaaattttctggtttgcaacagttgatgttgcgactcctgatccacatgcaattaaaattttcttcatgatacattctcctttatatataaattattaataagttctattttgggctgtcaattgatcagatcacctaagacttcttcaatcttctccacgctgcctgatttaagtaccgccaatacattctgatcctggcatgcctcgatgagtttttgcagcagtcccagctgttcttcttttttcttgatggccagcataaacagaagggacacgctggttttctccccctccattcccatgacacaaaaatccacaggttcatccagcacgcccagacagatggcaggctttttcacatattcaggatctgtatgagggattgccacattgatgtctccggtgggaagtccagtagggaagttctcttcccgttttataatggcgtcatggaactcgtctgtcacataaccctccccgaacatggcatctgccatctgccccagcacatctttatcactggaacctgacaaagaaactgcaaggtaatgtttgtctgtgttattggttatcatcttcattgtctttctccttatcatttcttgtttctagattttttaaagtttgcagcaatgcttttgcatccggcatggaatctaatttcttccgtatgttttcattgccgaagatcatcatcagatcatagatggcactgttgatactttttgcgctttggatgctcattccgaccacatatctcaccggatcattggttccgctgtgaaaatctataggttcttttagtcttaagatcgatgccgcctcctcgaccacaccctgttcggcacttgcatggggcagtgcagtctcagggcagaccacaatataaggaccatttttcttaatgttcatgaccatttcttccacatattccgatttcactgcccctgtttccaaaagcagcttacccgactgccgcactgcatcctcccagtctttggccagatactccacctggatcctttcctcagacagcagatcataaaatgctccctggatattggcgtcagacagactggctgtatcgggtaccttctcttttactgtctggtcacttccctcgcggatgtccaagaccatcctctggatatccagaatgtcatccttattaagcatcggtgaacgtatttccacgcaaggcaggttcacattgtccagcgggatcgtggaaatgatcatctgggttccatttgtctcgatctccttcatattatggaaggaagaaatactcacaacctcgatcatgtcatccagcatctggagtttcgccagcataaactgtgccgttcctcttccagtagcacagacaagggccacttttaccttcttacttttttcggtctcagcccgctccttttccagaactgaggcaaagtaaagtaccataaacgacatttcatcctcagaaaactttttccccacatactcctccagggaaccaagatgctgccggacattttcaaaaatcttcggatagtcctgctttaatgtatcttttaaaggattcaccaggatctcaccgttttttaaacggtggaccgcggatttcatatgggccacaagcagatcatacagggaaaaatccaggtaaaaatcaattccaaagcaggtggaaatctgatagatggtctccgctatcatcacctttaattccagcgcatttgttttttgggcatcgtcctttaggtagctttttccgttcaggcattctgtataatacagaatctctacctcacgaatatctatgtcgtgcatttctgatattttctcaaataagtttttactgaacgtatatttggaaccttccttcagataattccactcgtttgtataatagccgggcaggaactgccttcttgtgatcctgttggtgatgatcgttaactccgtcaccgcttcaaagaaagaatagtccgcaaaaaatgtctgaagtgcttcttcctcttccagaatgcaatttttgatcatctcgtaatttcccagactgtccgcttccttgagcagcaggttccagaaaacgcttagattatagccattcttatagtaattatcgtctccgttcacttccagcaatttaagaatcccgttcctgatctccatctcgggcgcttcgatgatgtaaccgcgtctgacctgtgacaccagcgtcatgccgttttccttaaaccaggcttttaattcttgaaagtcctgtagcagcgtattgcggctgactccgatcttttctttcagctggtctacggtcacatatccatttgcgttcaaaaggatcatcgcaaggatcgtggaacgctctttttttgaaaggtaataggtatagaagtcatattctgaaatcattttttcaaatgcccgtatgtcgatcttcgcatcagattcgatccataatttcccctcagcatccgaagcaataacaggcagatgatgcgtttccagatctttattcagctcttttatatccgcccgaatggtcctctcctgtatgttatatgtctcctccaactcagaaacatctgcatgaataccaagaatcaaatccttcaggatcttattacttcttctgttcatttttctcctccttgagcttaattctattctaaatctattttattcgacaaaaaagtccaaacaaatgcaaaacaaatacattaaattgggttattttccggcagccaattctttgatatctgactctttactgtttattgtaattaaaatcaggacagaaatccgttcttttggatttctgtcctgattttaattatcacgattcagttttttggcaaatgacacagtgccttttggcgtttcttctatccggaaaggcagggaacaggatggcaccccgttttcatgaaattgggatctacttgcccttcatcaatatcgtgaaccaattccagcgggcatgtaaactcatgacggatcttcaatacaagcacctccttcttttctactttcaaaacaaaaggcggaaatctattttgatcgtccgcctttcatcaatttcttctatattaaattgtatctgtgctgttaatgcctgtctccagcgcttcttttactaaccggataaaattaggatatgttggatcctccaccagacgttccaccagagatttgtctgcgaacattttggagaaataatcccagagctgaaaggcctgcggattattttttccaatgtgcatcagcattacaaggtggacttcgttcttctcctcatcccaaatgacaggctccttggatacacacacagccacaaaggtatccgatgaaactgcatacatgggatggggcaccgcgatctgtttgctgaaaaatgtacttccgatctcctccctctggagaacctgggagtaaaggttctctacctcaaaataggcggtggatttctcgcagagcatgctgagcacttcttccttgttggatgatctcacactggaaaatagctctgggtggaagatctccgccacatcctctatgtccttgaatccatcaatgtttaatttaatgttcatatagtcatgctggttgggaaatgtatccacatacatcgccaagcctttttcaaaaaactcttccttttccgttgtcagaaagatgtcgtattcatccagcatatcctccgtcacatccatgggatttacaaagtcgatgacagagacatactcagaaaaccattttaatagcgtctgcttcatgagaagcgtcatactgttttttaatgcggagatcaccaggatccttttgttcccctgccggctgtttaattccaaaaggctgctgtagaagtggacagccagaagcgccacctcatcctcggatactctctttccatactgctgatggagcagaaaggcaaagtatgccccaatgtcatatcccagaggaaacgtctcacggatatagttcagcatatcatttttcacctgcatatcgtactttatgcggatactcagtgacatacagtgcaacgccagagtaatccttaagttaatgttgtctgtaaaatctactccgaagttcctcttgatctcctcaaatgcctgggaaataaaattgtccatctcctgggtgatagtatcggaatctctgttattgccctggcccttcaggtacaaagaaaagtatcggatttcctcctctgtgacctttaagaaaaacctgcggctgatctttccaaagaccgcttttgcgatctcatactcgtttcccagctgttctgtgatatccagttcccccggctgtatgtaaaagccctctcccatccggccgatcatgatattcagaaacaagatagcattgttaaaatccgtatccataatatgatatttataattgacgaaaatatcggtcagtatattcttaatcttagccagctgtctctcgtcgatatacaccataccctgttcattttttatgtgggccagatagagatcctgctctgccagacagcgccttttgttgatctcatacccgtcgatcatgatcttattactgcttttcaaaagctccagctgaaacttctccagtatttcttctaccttttttaaatcattctgcagtgtggatcttgacacataaaacttatcttccagctccataaccgacacggctctgtgtctgttcagaagtaaaagcagtattttgctgatgcggcttgtaggataattgagagataccgttgtatactgctggtacagagagttcacaaatgcagaaaattcatcatagtttttcacttggatacagctccccttggaagccttagagaccaattccgcacatgtctcatccatcaattcctttttaatcactttcatatcaccctgaaccgtcctaagactcacatccagtttcttcgcaaaatgagacgccgtcaggtactcatcagaatgattacaaaattctaataaaatttcaatttgccgttgatttaacattcaaatccctcttttgtgctgctgttcaatccgcctaataatacgaatctattataccttatcgcgcggagcgcgccaagccctgaaagggcataacatacgggatgccctgtgggtataccttatcgcgcaaagcgcgtccacccggagggtataaaacacgggatgccctactgagtatgagttatttaccactatttccgtcacgcttttgaaatgcgctcctccaatagtggtaaataactttcgtaaagtggctccttttgctcctatcagtttacattttgtgtgttttcattaaacgttacatattcgttcaggcttactggcagttcgttagagaatagatgaaatttataaaaatataaggtgccatcctacgatagtttttctccgttgtcggaaggaggcctttccagagccgactggagacaatggagaaaaactatcgtaaatggggaaagcttgtgaaaagaattgacgatgctatgttgttaggaattttgtgtataaaaagaaaggtccaatggcaatggatctttggaagtgaagaattaatccagatgcaaaagctaacaaacttaaaagacttatttcgattcaacacttgtcaatgttaatcccgttgtctcaagaagattagtaagaagcaatatatatttcaatacaactcttgttaatgtttatcgactacgaaggttgatattgaggttgaaaatccgaaatttcaatacaactcttgttaatgtttatcatataacagattgaaaggattatttttccaatgtgacatttcaatacaacccttgttaatgtttatccaccgcttcttcgccgtttcttctttttattatagtcagttttcctgataaaatcaacgtttcctttcttttttcccaaccgattgtactttttctgttttttctctgaaaacgtctacggtccgccattttatacggtttacaggcatttgtctatatcttgtggttgggaagataagcgtgcttcgcatgtttttctatgttataatgttgttcagtaatttgatttggaggtaacaaaagtgaaaaaaccagcattagtgattctcgccgccggtatgggcagccgttatggcggtctgaaacagatggatccaatggatgaacagggacatgccatcattgattattctatctatgacgcaaaacgggccggtttcggtaaggtcgtttttgtaataaaaaaagagatcgaaaaagattttaaagagactgtgggatccaggatccccgacggtatagaggtctgctatgcctttcaggaagtggacaatcttcccgccggcttttctgtcccggaaggccgggtaaagccatggggtactgcccatgcagttctctgtgcaaaaccatttattcaagagccgtttgctgttatcaacgctgatgactactacggcatccacggctatcaagccatggcccaattccttatgagagaatcatcctctgccaaagcaaaatttgcaatggtcggctatcaccttggaaatacggtcacggacagcggatatgtatccagaggaatctgtaaagtagatgaaaaccgtcagctggtttccattacagaacagactcatattgaaaagcgcggagatcacgcagaatatacagaggacgatgggaagacctggacttctctttcctttgacactctggtgtccatgaacttttttggattccgccctatgatcatggatgaattagagacaggcttttctgagttcctttccgcctccctgaaagaaaacccgttgaaatgcgaatactttataccaagcgtggccagccagctgatggagaacggaaaagccaccatggatgtccttgtctccaaggatcaatggtatggggtgacctacaaagaagacaaacagcatgtgatggatgctttaaaagccatgaaggaaggaggattatatccagaacacttttaggcagcttgtataaggaatcctaaaacaatagagcaaagtggacaagcccacctcatctccccaacccctcactctttgaggggcttgacaactttgagcaccaaatgcgatttgacatagtcaaatagtttcctcacgcatttgtgtgcataatggccatagggctttttttccatagggaggttcgaagaactttcctatggaaatacaaaagcagagagaagatcactgataaagtgccctgctctctgctttgtattatatttattttttaattttgtaaacttttacgttgttcttacgtccgaactgttttaccttcttatgggatttaaagtaaacatcaatatgttttccttttactcctccccctacatcttcggctacataagttttacccttgatcttaaccttgcttcccagtttgatctttctcttatctacagcgatcgtacggccctgttttgcttttcttccggtagcggttctgtttccataacctccgctgcatcgtttacatccgcagtatgctgtcagtttatattttcctaagtactgtactttctttgatttggcttctgttgatgatgaacctgtgataaatgtacctgttaatactacgaccatcatggtcagcaataaaagttttttctttgctgctatttttaatatcttcataatgtcctctttctaaagtaaatcattctggttactgtataacctatgatagttttttaagatttattcttactttttaaatatttgaaatatttttgtaacaacttagtgctagtttacttaacaattgacgatttgtcaaccgttgtacttaaaaaaatacagttttcacccaaatatccccagataattattacggatctattacaaaaaaagagacaaatccaaaggattcatctcttttttattcaagtctatttaaattcattaaaaaactgataatattagaaag

SEQ ID NO: 36 - DNA, 11924 bp, Anaerostipes rhamnosivorans
attatatataataaaggtgaaaccaatcttaaatatatataaaggagatgccatgattcgttcagattttcatttacataccagccactcatctgactcaaaagccccaatggaatctatgattttaaaggctgtagacctgggtcttacgaaaatttgttttacagaacaccaggattacgactatcccgaaaatgatgaaaactttgattttcttctggatatccaaacatataaaaaggaattatttacattaaaggataaatacaaagatcatatacaggtgctgttcggcaccgagatcggtctcatgcccacaacctatgacaaatgccgtgccttcgcgcgctcagaaaattttgactttatcattggatctacccatattgttgaccaaatggacccatatgaatccatattttttgaaacatatcctggaaaacaaggacttacaagatatttagaagtgattcttgagaatgtacagacataccatgactactgcgtctatggccatttggattatgcagtgcgctactgcccagataaaaactaccattttgtttacaaagactatgccgatttgatcgaggaaattttaagaacggtcattgatgatggaaaagggatcgaggtcaacaccggcgggtacaaatacggcctcggctatccgaatccccacccggatattttaaaacgctaccgggaacttggaggggaaatcctgaccataggatcagacggacactgtccggaacatatggcttatgatttttcaaagctttcggacctgctcacttccgttggtttccggtactatacggtatttaaagatcaaaaaccagaatttataaaattataaaaacaaggggagaagtcctggtcattggacacctccccttctgtcatttatattaaaatccccgcatccactcttcttttaagtgtatatttccctggattgcttcttccaactgggccatcattctttcccggtcttcgtttaaagtccctttcaaattgacataattggaagcatggttggaacggaagatacagcccggacagtccatgttttccagcatcagttttgtctccttgagattgtcatacggggtcatcagttcaaattcccctttttgaatcttctcttccaaaggcagtcccggctctaccatcaaggtcagcaatcctacataatccggcttcatagcggacagcacctttccggtgtcaactgcatgttctctccacagctttgttcctccaagaccagagattgctgtcacagacagccggatgcctgcctgctttatcttacccgctgactggatcatttcctgcggagtcgccccctttttcatgaattcaagcacctgtgcattacctgattccagtcccatatacaccatatccagaccgtgtgctttcagttcccggagttcctcttcttttttgatcatgacacttctgggtgacgcatagcaggtcacctgacggcattccggtatctcttcccgtatatagttcaggatctcattaagatattcattcttgcagatcagagcatccccgtctgccagaaagatttttccaatcgagctgtagtatgctcttgcctccctgaaatcagccagcacatcctgaagcggcctcattctaaatcgcttttctttatacatattacagaaaatacagtcgttctgactgcacccgatcgtcacctgtatgatcaggctgtatgcctcgctgggcggtctgtaaaccattccttcgtattccattggttcccctcctgattaactgcggtagatgcagatttttactcctggctccgcatttcttatgatctttttcatgtttgccttgctgactgcaatgcatcctgccgtgaaagactttttccctttacagtgcataaaaattgcagaaccctttttatatttatgttttggattgtagttcaaaaaaagtccgtaatgataatgtggcttgtaatcgatcaaatgctctcccctgcagcgatgctttttttctctcacatccaccagccggttatagtattttttgtcgccgcaccaataaagatatttatttaccttcgtatattccatctttgaccctggattttttttgataccaaaagctcccgtaaccccataagtaccggaaggtgttttcatatccccttcttttttcttatagattccttttttccctacatagcctctgcattttaagatccgtttccatttatgattctttttctggtacatacaaaccgttgctcttgatttcttatggtattttacaaagatcagctggtttactttactgtcataccggaatcggtcgaatttcttctgccatacagacttctttgccgctgcatggaccgtctgtttttctatgattcccgctgtcatattccaaataaggactgccataaccaacactgccatccatctttttttcttcattattgtattcacctcttgggctattatacacaaatacagataagaaaaaaagaggttttcgcaaaattatttgtatacaaactatttttatacaaactaaatatttccaaattccttctgacatgccgaaaatgtcttggcttcggccatagtcccacagccgaatattgtactaatggacataaagccatcatccacgcatcatttctttacaaaccggtcaattccattggctgccccttctgccatctttttttgaaagcgttcacttttcatagacatatcgtcctttgggttactcaaaaagcccagttccagaatcgttaccggcatagctgcccagtttataccgctcatctgatctgtcagcgtgacgccacggttcttcatacccgtggccttgcagtactcttttagtacgcttttagacagttcctgagattgtttagccagccgtgccgcatatggattgttatttgaaggcgccatagaaagagcaccccgcactgcatagtctctcgaaccattggcatgaatcctgataaaaatatctgcgccctttttttcggcaaattttgctcttttggcattgctgatatttacatctgctcttttccgggtcaaatacaccgtataccctctttttacgagctctttcttaagtttctttgataccataagggtcagttcatattcatttaatcctgacacaataccgctggttccagaggataccttcgatttcatttctttagcccctggcccgatgggctcctgggactgatcctgtttcctctgatgccccggatcaatcactactacatacttctttttttctgcttttaccttttccttagatttctgctctgccttttgtcgtgtttcttcagagaaaatcgtcctcttatcggcgggggaagaatcccttccgtcctcttttcctgcaaaatataaaatcattattcctatgactgccaaacacgcgccaatgactgcggaagctttgattatcgttgtcttattcatccatatcccaggtccttttctgcttttacaatcggttttaggttatattcttcagcatattctggtcatgccgtgcagacattttaaaacaaaccaacaaaaaaatgtgaagaaaaatgccggaagatataatttctcacattctccgctctcaataatccaagaactatataataaagaaaggcagaagccgtcttttaaacgtacttctgccctctgttattctgtttaattcttctttgtcaattttcctttttgtacgattgacttgatattcagctctttgtctaagataacaacattggcatatttgccctctgaaatacttccatatttatcatcaatgccaatggatctggctggattctgtgatgcacatttgactgcactctcaagtggaatccccatgctttttactgcggttctcatacagtccatcaagtttgtggcagagcctgcaatcgctcccccttccgctaaagttgcaagattgcccacgactttaacgtcctggcctcccagctgataagtgccgtcatccattccggtggccatcatgctgtcactgatcaggataatatggtcatctccaaacatcttaaaggtagtcctgacggcactgggatgaatatgaataccgtcgcatataagttccacatccagtccgtagtcacaggctgccccgatgacacctggtgccctgtggctgtaccccggcatggcgttgtagagatgtgtcacgtggctgactccatgttcaatggcttttactgcggtgtcataatccgctgcagtatgggcaatcgagatgaccgcctcgtcttttacctgacggataaagtccatggctccctcggtttccggtgcaatgtccaccagcttaaataaaccgtttgaagccttttgaagcctccggtacatgtccacatccggtgtatggatatacgcaggattctgcgctccctttttggcctcattgatgaatggaccttccatgttaatgccgaccagatccgctccagcgccgcccctatatccagcggctgcctcggcgatggacatcagttgatcctccgctaaggtcatagtagccggacagatcgcaagcactccattttctgcttcatactctgccatcttatggatagcttcagaagtcccgtcacagaaatcatatcccacacagccgtgaaagtgaatatcaaccagccctgggattgcatagcagccctcggcgtctaagatctgttcatcctgtgaagaatcacaaaatatttcaccgtccgtacagatatcttttgaccggaagaccccgtcttcacaaaaaacttctgcgttttttataatcataataaatcctctacctctgacaatgcgtccgcatctgctaccaggatcacatcattgtgaagctgtaagatggacgccggtactttcggtgttaccggtccgaagaatgcttcttttacaatacctgctttttctttgccgctgataataagaagaatcttctttgctttcatgattgatttgatgcccattgtataagcctgtctcggcacgtcttcttctttttcaaagaaacgcttattggcattgatggtgctctctgtcaaatccacgcagtgggtctctttttcaaatgcttctccaggctcgttgaatccaatgtgcccgttgtgtccgattccaagaagctgtaaatccaccccaccgatttcctctaacacctggttatatcttgcacattctttctgcgcatcttcttccataccatttggaatgttgatattctctggtttgatatttaccttattaaacagatattgatgcataaaatagtcatagctctggtcattgtctttcggaagccctttgtattcatccagattcactgatctcacctggctgaaatccaaatcgtcctgctcataccaatgtaccagattctcatagatcccgatcggtgaagatcctgtcgccagccccaatacacagtctggcttagtgatgatctctgctgagataatatttgctgccttcctgctcatgtccttgtaatcttttcccttaataactctcattttctacttcctttctatgatccggggaaacactaaaagctgtttccccataaatagtttccatctattactcaatataactcttagtttacatttcagcaagctttattaactcgtctgccacaaactgcactttcgtgcctacgatgatctgaatactgtttttgccgggacgaataattcctgcaattccagctgacttaatctttttctcgtcaatcagatcctggtccttgatttccagacgaagccttgtgatacagttgtcaatagaagtcaggttatcctttcctccgagcccttctaaaatgatctgcgccactcttgtaaaatcatcatttgccaatacggcactcttctcctcctccacgtcatcgtcttcttcacgtcctggagtctttaagttaaacttcacaatgataaaacggaacagcacataataaactacaaacgcaatcacaccaagaatcagcagcatccacggcttattggccattggaagtctggaactcaaaaggaagtcaaccagtcctgcactgaagctgaatcctgctgtagcatgtaaagctgccgctaccgccacaaaaataccagtcagcaacgcgtgaaccacatacagtgccggagccaagaacataaaggagaattccagaggctctgtaacgccggtaaagaaagaagcaaaggccgccgcgatcaatagacctgccgctacttttttcttgttgtctttggctgtatggtacatagccagagcgcctgccggcagaccaaacatcataaccgggaagaatcctgcctgatacataccagtgatacctttgactccggtccctgcccagaatttaccgatatcgtcaatgcctgcaacatcaaaccagaatacagagtttaatgcgtgatgtaatcctgtcggaatgagcagtctgttaaagaatgcatagattcctgctcccacaggtcccagtcctacaatactttccccaaatttgactaatacattatacaatggcggccatacaaaatacaaaataccagaaacgactaacattaatgctgaggttatgatcggcacacagcgttttccactgaagaatgataaggccgttggcaactgtacttctccaaacttattaaagcaagctgatgctataagaccggaaataataccgacaaaagcgttttggatctttgcaaaagcaggagctacctgctcaaccggaatgttcagcaaaagtgccacattgtcactatttaaaatagtcgttacaacaagataagcaaccaatcctgacagtgccgctgcgccgtctttctttttggtcattccaagagcgacacccacagcaaacaagatcggcagattatcgatgatggctcctccagccttcactaagaatactgccaccgcgatcggagctttgtcggcattggctgccataacattggggtcgatcagataaccgatacccattaagattgcggccgccggaagtaccgcaaccggcagcatcaatgctttacctaatttctgaaaatatttcatcataacaataagttcccctttcaaattaaatccttctcttatttttcatttaaccggatgatcagctcccctgcctctacctcctttccgtggaagcattcgatatccgtataatttcctttttcacagatgacaacaggaacggttacatcataacccgccgctttgatggcatccatatcaaatgtgagcagcagatcgccagcctttaccggatctcctgaattcttatgagccgtaaaatgttcccctttcagttcaacagtgtcgatccccacatggacaatcatttccagaccgtccggccccgagatgctgaccgcatgctttgtctcaaacatcacgccgacttttccgtcgatcggcgatacaactttcccctctttcggtatgatcgccactcccgtcccaaggatttctcctgcaaacgtcggatcagccacttgattcatggcaatcactgtccccttcattggtgacagtacttcaaccgatttcacttcctgcttaaacgctttcttcaaagacttaaacatgattccctcctattttctaatgttctttgtctgattgctgctttttatgcgttcaatatgcattgttaagtatacaatctctccctctgacatttcccgccggtattccttcttaatatactctgcaatctcctggctgcattgatactcatccggatacatggctgagatcatcttctggagctcaggctcaatttcgtccatccctcctcctgacatgacttttcttgacaaaaacttgaggtgtgtaataaatctttcatagtttagagaagtttccgtaagttccatttgaaaataatctttgaccttgtcaataacgtttttgataaaagttgtgatctgtactgtgtcacgcactttcgtatcatactctgcactgaccacatggagggctatggataccgcctcatcctgtggaagctttacacccaagtccttttccacgattccaagagcatattccccgatcttgtattccagatcatagaatgtcttgacctcccggctcagagggttggggtacatcatatcctgcttcattctctgaagcgcaaagttgatatggtctgtaagggtaatatagatgttttcattgagcttcgtattaaggatcccttttgcatacatgatgatgtcgctacatgtctgcagaagctccatcggaaggtccgtgatcaattctttaaacctttgactgacccccgggtcctccatatgaaaaaccttctggatcttgctatcatccacaggagaacctgcttttcctttaaacccaagaccggtccccataaggatcacttcattgcctgcttcatctatggaactaaccacattgttgttgatcacctttgtaattttcataatgcctctcctcataaacatgaacaaaagaaaaaaaacccaattctacaagatcggttgaagttccctcaaaaaactttccctactcgtaaaatccggttttgcctgccgaacagtgacaatccacgaataataaatatcaccagttattcctctttatgtgattattatattcgcaagatgcacagatgtcaaccccctattttttcgatttgtatacaactgtgccaaagaagtcaatggtaacatttaccatgccgctttcgtcgacatttcatacccaactcttcataatagaaggaaaatacacaaaggagaatctattatgaatcatttatctacactaattaccgattacctaaggaactgccagatccgaaaacgtctgaatgccaaaacactgaaagcctacaaaatcgacttgtcacaatttgaaaaatttatgtcaaactattcttctccattctgcaaagatgcattaaattcttatatctctgatttgcatcaaaaatatcagccaaaaacagtcaaaaggaaaatcgcagctacaaaagcattttttcattaccttgaatttgaagagtttttacccgaaaatccctttaataaaatttccttaaaattccgtgaaccgaaactgctgccaaaaactatccctccacatgttatagaaacctttctgtccgagttatataaaaagaaaaaagaagccgtcactacataccaaaaaaagtgttccctaagaaacatcgctgtcgtagagctgctttttgccacgggcatccgtgtttcagagttatgcagcctgaaatcagaaaatattgatctgatcaatcacacagttttaatatttggaaaaggatcaaaagaacgtctcctccaaatcacaaacatggatgtcctttccgccctgaacgaatactattcatttttttgtaaagagatcttaagctgcggatacttttttgtaaaccgtctggggtcccgtctctcggaacagtccgtccgcttcatgcttgacaggcatgcaaaagcttctgacatatcccttcacatcacaccccatatgttccgtcattcctttgccaccttgcttttagaagaggatgtcgacatacgctacattcagcagatcttaggacacagttctatcaccactaccgagatctatacccatgtctccacacaaaagcagaaaaatatattgatgaacaaattgcccagaaaccatatgagcatccggaagtaaaggataacaatgtattatccttcttaaatacccgaaaacattgtgctgcttaaaagagaaaggaatcatttttgaccacatcaatatcggaggtatgggagcaggaggtgatagaaagcaattttacagaaatatctcaatgtccgaagaagaaatagacatactcagagaactgtcagaggcaggttcagcgttcaatatcagaatcatcgcagaagacggagaaatagatatttcaaaaatgctggataagtaacttaagaaactaaagacaagaaaactagaaaaggaggtcgtttatgaaaataaccctatttcaggcacttctaattggaattgtatactacttaggcaatacaggcaccccgtggctgtccttgctgggaagcttttctgtcgtatacaggcccttggtggcaggaacaatcgtcggatttattttaggtgatccggtacagggatgtatgatcggtgccgctatcaatctcccttacgtggcatttatcaatgcagggggaacccagcccgctgatccggggctggccggcacagttggaaccgcatgggccatggccgccggtgtcaacccagccgcagcagttaccatcgctctcccgcttggactgcttggaacaatggtgtgggtagcacatatgacgttggatgtaaccttcgtacatatggcagataaggcagcagaagaagggaatctggagaaaatatgcttctggcatgtagttccgcctcagatccttatgttcctgctctgtgtggttccggcaaccgcagcaacttattttggatctactgccgtcaaaggtattatttcttccctgacaggtaaaccgctggcaaccttaactgtgattggaggtctgcttcctgcacttggtatcgcaatgaacctccgtgcaattggacggcctggtacacttttgttctttcttgtaggatttatagccgttgtctatttagaactacctgttatcgcagtggccgtactggcaggtgtgatcggatacttctataccatgctgagcaaccagacaccacaggcagccgccgctggagattcgtgtggagctgtgccaatagaaaatgacgatgaggaggatttttaatatgtctgaagatataaagaaaagattatccaaaaaagatgtctcaaaggctttttggagatgggcatttttctcccatgcaaattataactatgaacgactggaagcaactggtctggttttttctatgaagcatattataaaaaaattatatggcgatgaccctcaggaatataaagcctgcctcaaaaggcatatgcagttttttaatacagagccgaactttggtgcagtcatcccaggaatcgttttggctatggaggaagagaaagcaaatggagctcccatatccgatgatgcgatcaacggtgtgaaaaccggcctgatgggtccgtttgccggtattggagataccctatggcagggcaccttaacaccgatcctgctggcatttggtatcagtttaggttcaaaaggaaatcttcttgggcctctggtgtacgccctgctgatgctgggaatcatgtggccgatcgcgcatttttgctggacaaaaggttaccagcttggcaaagaaggaattgaaaagattctcggaggcaaccagttacagttgttgatcacaggggcctctgctatgggtgccatcgtactgggggcattatcggcacaatttgtaacggtaaagtgcattgcgaagctcaatttcggcgctttgaatatgaatatccaggaaactgtgtttgacgcattatttaaaggtgtattacctttggcctttacaatgctgacttattatttactgaaaaagaaaaaaattaatccaacggccgtgatgggaatcttaatactgatcggaatcatcggaggagtgcttggaattctgggcgcgtaaagcagaaaatatcgtggaggagaacaatgggagaaatggcaaagaccctggtattcacaggggagaaacaaattgagatacaggaatatccgattcctgaagtcagtgacgatatggttctggtaaaaacagatgcatgtgcgatctgcacatgggagcagagggtttataccggagtaaaaa

SEQ ID NO: 37 - DNA, 11199 bp, Anaerostipes rhamnosivorans
atatagactaatcattgcaatttttatattgacactaaattattttcttttttatccaaatgaaaacttttttaaaagaacattcatcaaagaattatggcataattttaagattaatgtaattgcggcggcttttatggctacggtcgcctatttaatcgacgacgcaaaggattattcacgctttatttatattatgactatggtatttagttttatttggatgcaagtagtacatagtttgtatcgttattatatgttgagatttaaaaaatatagtcagactagccagaagatgctgatagtaactaccagtgaaaaggctgatgagattattggaaacataatcaaagaaaagacctggaacttatggatcacaggagttatcattttagatcaagattggattggacgcaagatccatggaatccctgttgttgcaaacaaagaaaatatgtttttatatacagtacgttctgttgtagatgaaatctttatttacacatcagaatctaatagaattgcaataaaagatatagttcaaaattttagagacatgggtatatctgtaaagatgaacatcgatttgtttaatatggaaattgctactgaaaaatatatagacaaagtcgggcaatataatacagtatgttttgcacctaaaataactccacttcatatggtttttatgaaaaggctgattgatattttaggagcatgtatcggattagtaataaccttttttattacattgttgcttgggcctttaattaaaattgaatcgccaggtccaatctttttttctcaaaaaagagtcggaagaaatgggagaatctttaatatctataagtttagatctatgtatgtagatgcagaggaaagaaaaaaagagttaattgaaaaaaatgaaatgaatggactgatgtttaagattaaaaaggatcctagggttacgagaattggaagaataattagaaaagccagcattgatgagttacctcaattttggaatgtgttaaaaggcgatatgagtttagtaggaacaagacctcctacggttgatgaatttgagcattatgagggctaccataaacagcgtctaagcatgactcccggtttgactggagtatggcaggtgagtggaagaaatgatattcaggattttgaagaaatagttgctatggatgtagactatattaataactggtcactaaaaaaagacttgggtattattttaaagactatccgagtagtattaatgagcagtggtgcgagataataaccgctatttagagaggaagatttatgaagatttgtttagtagggtctagcggaggccatctaatgcatttgtatatgttgaaatcattctgggaaaacaaagagcgattttgggtgaccttcgataaagaagatgcaaatagtttattgaaaaaagaaacaatatatagatgttactacccaacgaatagaaatgttagaaatctaataaaaaacacatttttagcaattaaagtcttggtgaaagaaaaacctgatttaataatatcatctggcgctgcagttgctgttccgtttttttatattggtaaactaatgagaataaagttggtatatatagaagtatttgatagaatagataaacctacattaactggaaggttagtgtatcctatcacagatagatttgttgtccaatgggaggaacaaaaaaaagtatatcctaaaggggtgaatttagggagtattttttaacaatagggaggaaagtatgatatttgtgacagtgggaactcatgaacaacaatttgataggttaatttcatgtattgataaattaaaaggggcagggaaaataccagataatgtgtttatgcaggtcggttattgttcatatataccaaaattttgtgagtggagccactttctatcatatgaagagatgattcataaaattactgaagctcgaattattataacccatgggggacctgctagtttcgttgcgcctttacaaaaaggaaaggttccaatagttgtaccaagacaaaaaaaatataatgaacatgtaaatgatcatcaacttgaatttgttcgtattgtagcaaaccgtatgaataacattttggttgttgaggagacctacgacttagaagaaatattgcaaaactataacaaattagtaacccagattaaacaggaatcattttatcataatgagatctttaacactgagttcgaaacaatgatcaataaactgtttgagggcaaaaaacgtagataggataaaaagtatgagtgaactggtaagtgttattatccccgtatataacatagagcaatatattactcgctgtgtcgacagcgttctagaacagtcttatagtaacctggaaattattttagtagatgatggttcaaccgacaattgtggagcaatatgcgatagttataaacaaaaagataatcgagtttcggtaattcataaaaaaaattgtggattatcagatgctagaaatgtaggagttgataaggcacgtggggattttctatcgtttattgatggagatgactatattcaccctgattatattaaattactatataatgctatggacagagagaaagcagatttggctatctgcggatttcatattgtagatgagggtggcaatacaacaaataaattatctaatggtgaaaaatacaggactgttataccaataagaaacgaagtattatcaggcagagatataatatataaatcatatgtgctgcagaacggatttgcatttgttgtagcatggaataagttatatagaacaagcctttttaaagaattgagatatccaattggaaagatacatgaagatgagtttgtgtttgctgatttactactaaaatgcaagagagtagtttgtatgacagatagtctttactattatgttcagcgaaaaggaagtataatgtctgcagaaaggatggatttaagaattactcatttgatggaaatacataataaaaggtcaacgacttatcaaatatacaatgaaaagaaattacagattttagatatgcaagaatatgcggatcaaattattatatattatactcaggttggaagaccaatgaaaaaaaaactgcggaatagatattgtaaattaataaaacagattttaaatcaaggtcaatgttcaggaagaaaaaaactaaaatatatgttaggattatttagcttgaatttattaagtagaatgagaaagtgttataaatcaacaaaaagatgtatgaattaaaggagatcgaaacatggatagagtattggttacaggagcggatggctttatcgggagtcatttggttgaggagctggtgaaaaaaggacatgaggtaaaggcttttatatattataattcctttaactcatgggggtggcttgacagtttgtctgaggaagtaatggagtctgtagaagtattcgcgggagatatcagggatcctaatggtgttcgtgaagcgatgaaggggtgtaatgccgtttttcacttggcagctttaatagcgataccttttagttatcattcaccagatgcctatgtggatacaaatataaaagggactttaaatgttttacaggcagcaagagagaggcagatacgtgttttaataacctcaacatcagaggtatatggtactgcaaaatatgtcccaattgatgaacaacatccatatcaaggacaatctccatattcggcgacaaagataggagcagatcgtttggcagaatctttttaccgttcttttgagttacctgtatctatcgtgcgtccctttaatacttatggaccacgccagtctgcacgtgctgttatccctactattattacacaacttctggcgggtaaaacagaaatcaaacttgggtctttgactccgacaagggattttaattatgtgaaggatactgccaatggctttatttctatctataattcctcaaaggcgataggagaggaaataaatatcgcaacaggaattgaacattctattggtgatttggcgaatgagttgattgcgcagattaatcctaaagcggtgattatttgtgacgaacaaagactaagacctgaaaagagtgaggtaaatagattattaggatgcaataagaaaataaaaaaattaacagattgggaacctcaatattcttttaagcaaggtttatctgaaactgtgcgatttttacaggagaacattcaaaaatataaagtggacatttataatgtttaaaaggggataactatgaatcagaagtttataccattatcagttccgaatcttaaaggtaatgagttaaaatatgtaagtcatgcgatacaaacggagtgggtctcaactgcgggtccgtatgtggaacagatggaaaaagagataactgactacgtcaagtcagcaggtgcagtggcatgtcaaaatggcacttctggattacacatttctttgattgtcgcaggtgttactaatcaagatgctgttattgtgccaactttaacctttattgcggctgtgaatccagtaaaatatgttggagcagagccaatctttatggactgcgatgaatcgttttgtttagatccaataaaactagaaaaatattgtgaaactgaatgtgaatttagaaatggaagtcttatagacaaagtaacccataaggttattaaagcaattattgtagttcatgtttttggaaatatggcagacatggaaaaaatcaaatctgtttgtgggaaatataacatcaaaataattgaagatgcaacagaagctttgggaacatattatactcaaggtacctataaaggaaaatttgcaggtacgataggtgattttggagtgtattcatttaatgggaacaaaatcattactacaggcgggggtggcatgattgtttccaatgataaagaaaatctcgctaaagcgaaacacctgacaacacaggctaaaagtgatgatctaaattttattcatgatgaagttggatataattatagaatgacaaacctgcaggctgctttaggaattgctcaactggaacagttggagacatttattgaaataaaagaaagaaattatcgattatataaagaaaaaattagtaaaatagatggattgaaattggtgagctttagaaaaggaatccgtagtaatttttggttttattctttggatgtgcaagattacaaattaaagaaggaagacttgattcattctttacagaaaaacaggattcagacaagacctatttggggattgataaatgaacaaaaatcctataaatattcacgttcttttcgaattgaaaaggcaaaagaattctggagaaatattgttaatattccctgtagtacaaatttgtcagaaagtgacgtagagctagttgtttcaacaatcaaaaacttgtaatcttaaacaaaggaagaaaggtgcattaatggaatttgagaaatgcctaataaataaaagtatgtcaataatgcaggcaatgacactgttagatgatttgggagtcagggtgttgtttattgttgagaataaaaaacttattggttctttggcagattctgatattagaagatggattttaaaacatggcaatatcgatgccgaggttattactgcttctaatttgaagccgcgttatatttatgaaaatcaaatacataatgcaaaaattttaatgcatcgatggcatattgatgcaataccagttttaaatgaaacagatcaaattataaatattgtattcttatatgataagcctccagttaatgataatcaaaatttaaatattcctgttgttatgatggcaggaggaaagggtacgagattgtatccatatactaaaattctacctaaaccgttaattcctattgatgatatcccaattgcagagaggattctaaatggtttttaccaaattggctgcgacgatttttatatgatcgtaaatcataaaagtaatatgattaaggcatattttagcgatcctgcatttgaatatgatgtcaaatttatcaatgaaacaaaattcttagggactggtggtggcattggactattaagaggaaaaataaactcgacttttatcttaacaaattgtgatatattgatcgaagaaaattttgaaaaaatttataaacagcatataaaaagtaagaatgtcgtcactatggtatgttctttaatgaactattctattccgtacggagtagttgaatttggagaagaagggagactcattaaggtgaaagagaaaccagaatattcatttttcaccaattcaggattgtattttgtagaacctgaagttatagatctaatagaagcagatcagtccatagattttccggaaataattgaaaggtgtatgcaaagtgggcttggcgtgggagtataccctattggtgcaaatgcatggatggacatgggacaatttagtactatggaaaaaatgcagcaacattttcaggaaagaaacatttgatgaagcttttaatttgttcagttgtatttccgcaatccatgagatattttgagagttttattaaaagcattgatatgcagacaaataaaaactttgatttccttttagtaaacgatggagttgacctaaaaaaatatgatttaagaaatacgattatcgttaacgctaaaggtagtatattagaaaacagaaggcaaatgatcgagtatgcaattctgcacaaatatgactatatagcttggcaggatagtgatgatttaatgttgcctgatagaatagaatttttgcaaaatcatattacaggaatttatgatatttatgtacatgatctttgcttaatcaacgaacaggaagagaatctaaatagaaatttcattggggacaggataagtttcgaagaattcacctttaatgatatcatgttttataattttgccgggtttgggaattctgtcataaaagtgtcatgtctggcaaacatcatttatcctatttgtgaggtaaaggctgttgactggtggctggtgtctgttctgctaatgaaggggtatagagccttttacctgaaaaaagttctggggaagtacaggcagtatcaaaacaatctttctggtttacagaagttggatttgtctgctttccagagaaaaagacaaatagttattacccactatgaggctctttttgaaacgtgtaagaactgtactttcaagtatccggagattttacactattataataaattattaaaaactaatatttcagaatttgatgtaatggaaggtaatacgcaagaaggactatggtgggaagatgtttacaaccttataaattcaaggtaaaactatttagtattatcaagtaaatatgaaaagaaagatttagataggagttgaattatggcaaaattagaattagataatgggacagttattcaggactatgcaaaaccatatgtgattgcagaattaggatcaaatcataatggagatatgggattagcaaaaaaattaattttacaggcaaaagcatgcggctgtgattgtgttaaatttcagtcatggactaaggatacgatattttcaaaaaaggtgtatgaggataattacttcttacaagatgattatcggaatcgagatgattatacgttgcaagaaattgttgacgaatttagtataagcgaaaaacaattgtatgaaatgtcagaactttgccaagaaattgggatagatttctcttcttccccttttagcaaaaaggaagttgatttcttggcagatacgtgcaaagttcctttcatcaaggtggcatctatggatttggataattatccttttctaagatatatagccagaaaaaatatcccgattatacttgcaaccggattaagctctatgagtgaggtagcacgtgcagtggaatcaatagaaaacgagggtaataataaaatttttctgctgcattgtatctctgtctatccaccaaaatttgaggatataaatttaaacaatatcttgactctcagaaccatgtttccagactatccaataggtttttcagatcattcacttggaatcgaaataccaacagctgctacggctcttggagcaagcataattgaaaaacattttaccttggataaggacatgtttgggtgggatcataaaatctctgctgatcctaaagaaatgaaacagcttacagaagcgtgtcatcatgtacaactggcgttgggaagcacaaagagaattgtgaataaggatgaaatcgaaaaacgcttagcttttagaagaagtattgtagctgcgcgggaactatctgcgggaatggttttaaatgaaagtgatttgacgttaaaaaggccagggacaggtatgccacctgaaaaactatttgatattgttggaagaaaattagcgcgtaatgttgagtatgataaaataatagaaagagaagatttgttatgatagcactgatacctgccagagggggatccaaaggattaccaggtaaaaatataagaaatctaaatggcaagccattaattgcatataccattgaagctgcaaaaaaggcgaaatgcatagatgaagttattgttacaacagatagtaaagaaatcgcttcaatagctttagaatatggagcagatgttccatttttgcgtccatcagaactggctactgatacatcgtcggcaatagatgtctatctccatgcaattgagtggattagcaaaacaaaaaatatatctattgaaaagtttatggttctgttacctactacaccttttagagatgaaaaagatatagatgatgcctataatttataccagacagagaaagccagaactttaattgcagtaaaagatgcacctattcctccaggatggtttttatctgaatttgataataaaagggttgtaccatgtaattttggaacaggtaaattgaatgaaaacagacagaagtcagatcggtatgtcattccatgtggagctatatacatactcgattattttctattgaaggaaaaacggacatattatgatgccaatacagtaggatacaaacttagtaataataaatcggtagacattgatacagcagaggatttccaatttgcacaatatttaatagaaaaggaattggtagcagagaaagatgaaaaataagaagatactattgatagctaaggaaacatattcatggcctatgattttattagctgaaaaactaaaagaaaataatgatgtaggattgttttttatatgcccatcagaatgtacgtttaatgaatttgaactgggttattctagtacctattattatgcaaagaaaaatcttcctgatgtaaaacagtatgatgtgagaggcatctctttagaatttgtaaagaatgcaaaaactcccccagtggattatgattatatatcgatgttagaaaaagaatatacacattataaaaatattaatttacagtgtatgtcagctcaggagttatccagaagctttcactttagatcaatctatgggcatgctacacatgatcagaggttctattgggttgagctaaattacaaacagattattaatgtaataaatgattttcagccagatatggttttggatctaaataacgagatgatacagagaacaatcctcagtgaagtatgctataaaaagaatataccacacattaatgttgaagaatcaaaaatagaggataactatcattattcttttagcaatacagcagaacttgatgaatatttcttggaagattataagagatctatgaatcttacagaaagtgatctggcacaagagtataattatatcaaggatttccaaaagcgggtaaatataatggcggaacgcttaatggacacgccaaatgctcaatatacagcagatagctggagaaaaatttttagatggtttttaagtgctgcgcattatgagtatcaaaaagatataaagtctcataatggaaagctttgccgagcaaatcctgtattttttggggaaatgaaaaaacaattatcctactatacaaaagtggaactgaaaagaaaatatctattcggaaaaaacaaatattttgaagatcctgttccaggtgagccttatgtttatgtgcccttgcatttaataccagaatctacaacttttgtacaagcacctttatacgtaaatgaactgaataatattgaaatgctttcaaaatcaataccagcaggttggagaatatatgttaaggaacatcagacaatgcttggagaacgttcttttgaattttacaagaaggttaaaaaaattccaaatgtccgtcttgtccgttttaattattatcaagatcctaaaccttggatcacaaatgcaaaaggtgtattcacggttacggggaccggcgcatatgaagcagctttattaggtaagagaagtgttatttttggagagatggcctgtcaagttattgatggaattgaaaaagttaattcttttagggacctatctgaggcgattcgaaagtttgatgagccattagataacatacattcatgtgctgcttatatccatacagcacaaaaatatggtattccattaaaaatcaattatttgatgatgcatggaaaagaaatattaagaaataatttacaggttgatgatgaatataatagtcaactcaaccaactgatagacttttatgaaaaaggatataatctatatttgaatcgagagaagcttaaacatgaaggagcataaaaaaaataatttaatatctgcgactatggtatatacaatatgtaatttgtttgtcagtggtttagcagttcttacttcacccatttttactcgaatattatctactggtgattatggtatttactctttatttaattcttggcaaaacattttcgtatgcatcacatcactaggactttcctatagtattgcccttgctaagattgattataaagaacagtttaagcagtttattgctagcatcttacttattagtattttaattccgattttgttgctaatctcctccttggtgtttggaaatagtatgtggactagaattacagagttgcctagtagagtagttacaatattatttgttaatttgatcttttatacagtactggatat

SEQ ID NO: 38 - DNA, 9349 bp, Anaerostipes rhamnosivorans
atattagaaagaattcgacattatggtcaaattaccaggaagcgggcactccctgtctgttatagagtctcgatcactccatctaaatacaattcctctacgtcttcaatcagtccttcatcgcaggcttttgtcagcttcggatcgattggaagctttcctagtacaggaatctggtatttatcagcgatgccgtcaatatggctctcaccgaaaatagaaatttcctttccacagtccggacatttaatgtagctcatattttctacgatgccaaggatccggatgttcatcatttttgccatgttgactgctttttccacgatcattccaaccagatcctgaggtgtggctaccacgacgatcccgtccaaaggtacggattggaagacagtcagtggtacttcccctgtccccggaggcatatctacaaacattacgtcaatatcgcgccataacgtcttgccccagaactgcttgaccacatcggctacaaccgggcctctccagatcactggctgggtctcctcctccagcatgagattcactgatacgacctcgataccaaagttagtgagagccggaaggataatcccttcctgattgcccagcagcctttcgtgcaggccaaatgcctgtgggatagacggacccgtcacatcaccgtccaaaatggctgtgtggagcccctttctgtttgcggccacggccagcagggctgtggtcatagatttgcccacgccgcctttgccgctcacaactccgatcactttctttacactgctgtctttgtataatggttccataaaatctgtctgtgactgcgttctgtcagaacagctttcgctacagctgctgcagtcatgagtacactcactcatctctaaacctccattgctttaaaaagtttctttatattttcttctatatctccgttaaaaacggcagatcctgctacgaatacattggcgccacattccttgatatgggcgatattatcagctgtcacgcctccgtccacctggatatccacatcaagtccctttttctcgatcatattccgtaagtccctgatcttttgatccattgcttctatataagactgtcctccgaaccctggattcactgacatgatgagcaccatatcaaggtcatccagcacataatccaacacactcagcggagtggcaggattcagcgaaactcccactttgcagcctttttctttgatctgctggaccacacggccaagatgggtgcacgcttccgcatgtactgtgatatagtctgccccgcaggcagcgaattcgtcaataaatcttcccggctcttctaccatcagatggacatcgaataccttgtccgttacgctgcggatgcttttgatgaccggcataccaaatgagatattcggcacaaagtctccatccatcacatcgatatggatccactgggccccagcggcatctgcttttctgatatcgtcaccaagtgtcttgaagtctgccgataaaatcgacggcgataaaatgtattccatgctaccttctcctttttatccactaatactctaacagtagtattataacatatcctcagagaaaaaaggggaagaaaagctcttcccctttacactaaacttcttctgcaatttccctcatggctttggccatattccacaggtggtccccgatccgttcaaagtctaccagcatctcagagtagatgatgcaagcctcgtcgttacattctcccctcttcatccttctcagatggctgtcgtaaaactcttgtgtctttgcatccacaaaacgctccatctcgtgaagatcctcaagccatttctttgtatcctggatctctctctggaaataccggaacatattgtggcagatctgtttcatctcttttaactccgccctggcttggcgggaaaacttgatctccttctcctcaatgatctttgtgtaatcacatatattgacggcatggtcaccgatccgttcgatatttcctgtcattttaaagtatagactgatgatctcagaagtcttctcattggtctcagtcaccatcatcttggaaatgatcccggaaatttctttgttgaggtagtcaatatatgcctctctctcctccacttcctttaacttgtggctgtttccaattaagaaggactggaagctttcgtccacattttcttttgccatctcaagcattctctggatctctttgcccacttcttccatatgaatggcagcgcctccgatcctgggatccagacccgcatcccaagtccttaaatatttcaaatgcttctgtttctgtttttcttcttccttctccggcaggatcttcaccgcaagagatgccagctggtttccaaatgggatgagcagaaaacttgtggcaagattaaacagtgtatgcatattcgcgatctgtctcggcgcatttcccggtgtccaggatgcaaccagatcactcaatggaagtgtcaggcatatggttgtaaaaataatagtaccaataatattaaacagcagatgaatcaccgtagtccttttggcgctccgccctgtaccgatggctgcaaggatcgccgtgatgcaggtaccaatattctgcccgaacagtacaaacaccgcactgttaaatccgatcagtccgctggctgccaaggcctgcaggatacccacagatgcggaggaagactggatcagagctgtaaaccctgcccctgccaggataccgatcaacggattcgagaattttgtcatcaggttaataaatgcaggtgcatccctaagcggcatcatggctgtgctcatcatgtccattccgatgaacaacacacccaggcccgcgatgatctgtcctatgtattggatctttggctttttcagaaacaagaccatcgcaactcctgcaaaagcgaagatcggtgccatggcccctacatccagagcaatcagctgcccggtaatggttgtcccaatgttggcccccataatgatccagactgcctgattcaacgtcataagccctgaatttacaaatcctacgaccatgacagtcgtagcggaagacgactgaatgacggctgtgatccctgcccctacggcgactcctagaaaccggttggacgtcagtttctctaagatccgtttcatccggttgcccgcagctgcctccaggccggagcccatcatctgcataccgtacaggaacagggcaagtcctcccagcagtcctaatacaatcgttgtattcatatttttattctcctttgtctcacaatcatttcaccataacttaacagcaattttattttacatgattttcgtggagaataatgttaaatccttgtaaaattaacgttaaactttatttggttaactaatctttaatgatgacaaatcaatttctttttcttcaatttcaacatttcctttgacaggttttcttttaaggaactgaagcagcaccgcaaatacacaggaaccgatcaataatgccaaaagccagtattgcggatggttaaatcccggaagtgcaaagagccctcccgtgggaaccttggatgtaacgttcaaagccgcacatacagcaccacccacgccggcacctacaccggtacaaattgtaatccgaatcaagtcatttaaaatgatgggataagatccctctgttatcatacagcatcccatgacaaatgctgatttcaagttgtctacttcttccttagaaaaaatatctttcttcatgatcttagataagaaatatccaatcgtcaggccaaaaggcgctatcattgatgcctgcatcaaaatcgcaatgggcccaccgattccctctgccataacaccacatgcaaaaacaaaaacaactttgttgatcgggccgccgtaatcaaccgccgacaatattccaaccaatattccaaatgggatgatcatacccgcattgttctgcatattcaccaaaagatctgtaatcgcattggtcagcgcattgatcggaattccgatcacatatttcatgaccagccctaccgccagggatccgatcaggggaagaattaactgaggcaacaatcctgcaacccattttggtactttcataacttttaacagataaacagtcagatatccgaccagataaccgctgattagcccccctaaaaaaccaaatcccgcatctttacagagcagtccaaggatgataccgggagcaatgccggctttatctgctatactataagatatccctgtggaaataacgatcgggagaaatcccagtgcagttccaccgatggttgtcaaaaagtcagggaaagcaagctgttttgtaaagtcttctacagagcttcctcctgcaatgttaccgatcaccatcagcatacctgcggtacatacaaatgggatcagatatgaaattgctgtgagcatatgtttttttatttgcagttctttcatattatttatctccttctatgatattttatacaagctcctctatcttctctattaatttattcggagacatgaccactgtctctgtaggcacttctaccaccttttttccctcaaaccgatctttcccggaaatacttacatccgtcgccagaatgacgacatcagccgtctcaatctcaccggaacttaacgcatcctcaactccgatcaccccttgtgtttccatatgaatcttgtgtcctctctttcgggcagcattctcaagcttttctttggcaatatatgtatgggcgattccagccgtacatgccgctactccaacaatgttcataggtgctcctttcttattccaatgtcattttgatctcttcaacagaacctgcatttaagagttttccaacaacttcgtcatttcccagtttccctgctacttgtgcaagcaattttaaatgctgcatagcattctcattatcagttccaactgcgaacaaaaagatgaccttgactcctcttccatcatgagtttcccactcaatctcattctgaagctttgcgatggcgatcccaacttttgatacggacggactttttccatgggggatggccacataattcccaatccccgtacaacccagactttctctttgcataacatctgcaataaatccggctgcatcatcaacatatcctgccttttgcaacatttctgtcatttttttaagcgcatcttccttattgactgcgaaaagatcggaacggatcactctgtcgtctaaaacactcttaatatccatggcttcttcctttcaaaaaatattataatttgtaatatttcattttatccgcatcatcaaacaagtcaattttttgatttacaaccttcttcatggcagcaatactgtcaacatacagatcgaagggctctctgataacagcatcatccgccaaagtttttcttgtctgctgataaaaagcatctttaatatcagaagatatattaatcttattaactccccgttttactgcttctgcaatttctaaatccgggtttgctgaacctccgtgaagtaccaatggaatagaaactatatttttgatctccgtcagcaattcctgctccaagtgcggtacaaaatctttcggataaataccatgagccgtaccaatcgcaatggccagcgtatcgcattctgtttcctcaacaaatttctttgcgtcttccggctgtgtaaatacgatctcttttgctccgatctcacggtttcctgaatcctctttgatatccccaatggttccaagctcagcttctacagatacgcctaacgggtgggcgactttaatcacctcttttgtaatggaaatattatcttcaaatgatttgcttgatgcatcaatcataacagaagtaaatccgcaacggatagctctctgtacttgctccatcgtctcaccatgatctaaatggatacacataggaacacgggttttgttagccttgtccttacacatttcaataaagctgtcgccctgaaattccaattcattcggatgaatcgccagaataaccggcgcctgtttttcctcacagcattcaacaactgcgttcaaaatctgtccggtaccaatattaaatgccggtacagcgaaattcttctcatttgcgactgccaataaatctttcatgttcaataacataatgaaatctccttttgaatttgatggatgttctagcaactcttcacaaaggaattttatagatgcatcttacctttgttgattttgatattataatattaactttgcttatgatatttgtcaatctttttataaaatattattttatatttttatttttttatatacaaattacaaaaaatatgctaatattcatttaaatccagggcctatataaaatattatttcttatataagaaatattatttcttttgtagcttttatctggttaatattactttaaatgtattaaggaggtttttatgcagcagaaaaactatattggacacccttcacagatcatgggtgtagaagaataccggctgatgcacggaaaaggtgatcatatgcatatgcttcacatacggaatggattaggcatggaactggtaattaatgctgaccgctgcgccgacatttcccggctttgcctggatgggaaaaatttaagctatacttccgtggcaggagaagtagccccatcttactatactttggggcaggatggtttcggctttctaaaatcatttaactgcggttttctcacaacatgcggctttaacaacattggctctcccaatgaagatgaggggaaaatgcatggtctccatggaaatattggaaatacaccttccgattacatctatcacactgaaaatgataagcaaatagaggttcacgcactgataaaagatcatgagatctttggagcaaaattcacattaaaacgcgtttttactatttcaaaaatatccaatcagattatattgaaggataatatcctgaatgaaggttcaaaaacagaacctctgatgtatctttaccacataaatcttggttatccgctgttagatgaacatgcagaaatctacataaattcagcccatgtctcaccgagagatgagacgtcaaaaaaagggttaagctcctggaatcaaatacttcctcccacaccgaatttttctgaacaatgtttttaccatacttacaatacggatactgcaaacatgatggtctataacaccaaaattgaaaaaggcatacagattcagtttcctacctgccagtttcctcaaagtatccagtggaaaatgatgggggaacgtgattatgttctgggactggaaccttgtactgcttccttagatggccgtcaccgggtaaagaactcagggaatatcctttctttagcttctggagaatcaaaggaattttctgttaccgtcaatttattcaccaataaggctcaatgggaatcctatttataaagaacaaagcgggcttgctcactttgagcgccaaatgtaatttaacgaagttaaataatttccttacacatttgtgtgctgcgcacgataagctgtaggaggttccacaggaatttcctatgacataaagaaactattcatcttttaaggaggtaatgagaatgtcaacaattaagaaagtatttgaagcaggaaaaggtattttacagcttacaccaacctgggtgccaagaggattcaacgaaccgggacacaggcttcgtcttcatcccgatgactattatgcactcggcatgagccgcggaggaatctgcgaacgctggctcggttccataacaaaggctctcaatggtcctgagaccggggagacagaaggcatgagctacgtgcttgcagataaaaaaacaaaagaaaaaatacttctctcaaagtttgtagatgagttgggttcttccctgatcggggaaacattgatggaaaagtacggaacctggcctgtttttgcaaaattgtatgactatgacaagcctctattccaccatttgcatttgacagaagagcgcgcaaataaaatcggaatgcatggaaagccagaagcctactacttcccaccgcaatataactcttcttatctgggaagattccctctgacttattttggttttgatccgtccacaaccaaagaagaggttatggactgtcttaaaaattacgacgtgaaagatacaagaatcacagaactttccagagcctaccgtattaaattagggacaggatggtatactccggccggtgttatccatgccccggcctctgtggtaacctttgaaccccagtggaacagtgatgtaaatactatcatggaaaatgtaaccatgggtgaagtaaacccacataatcttctgaccgactgcgctccggaagaagaaaaaaatgacctggatgctatttttgctcagattgactgggaggaaagcacacgccctgattataaagaaacctacttccgtatgccgaaaatcaagacagaatcaaatagagctattgaaaagtgggttgcctatgcaaatgattttgtcgctgcgaaagaagtcactatacttcctggacaaacttatactctcactgatcaggctgcatatggtgctgtgatcacacagggccacggaactttcggctgttttgaatgcgaggctccggggctgctccattttgacgatatttccggtgatgaattttttgtttctgaaaaagccgcaaaaaacggcgttatagttaaaaacaccagttcttatgaatccctggtaattcttcagaactatgcgaataacaatcctgaagtaccagccagcatctaactgaaaggagctcttatgagaaataaattcggagttgacagtttcatttggactgaatccttttctgaaaaagatttatggatcatcccaaaggcaaaagaactgggatttgaagtcattgactttgcgatctccaatccatttacatttccagtaaaacaggtaaaggctgaactggaacgggtgggtattgactgtgtctgcacgacaacactgacaccagggacgaacccgatctccccggatccagagattagggcagcgggcgtcaaggccatgaaaaaatgcgtggatatctgcaacgaactgggagcaccgatcctgggcggagtaaactatgcaggctggggttatctcacaaagaaaccaagaacacaggaagaatgggactacggtgtggcatgtatgcgtgaagtggctgaatatgctaaagaaacaggcgatgtgaccatctgtgtagagtgtgtcaaccgtttcgagacacatttcctcaacattgcggaggacgctg

SEQ ID NO: 39 - DNA, 8057 bp, Anaerostipes rhamnosivorans
atttattagaatagaaaataaatggatcataaaatatataaaaataaacccaaaagcaagattaatagtaaccttcccttttgattttaaaagaataaagaatataagaatcaacaatgctcccagttgaacagcttttggtattaaaatcagaacccataaatatttaaatatataatattgacaatccttcatttattcccccatttatttccggaaaatgttcaaaatcttttccattctttatctctgtatgtgacttaatgtctttaataaatactctattttctattattacattctttaaatcctgtttattatagataggtaaattacttaacattgtagattcaatttcctttacaaattaattttaaaaattatttacgtgtataacaaaaactactctcccaaaaacaaaaatcaatattatatgaaaattttaatatattcattaattaggaaacaacaaggatagattttcttacctcttattatactcagagcatcttcttcatccaaaataacacaaaagcactctttcctttctcacgcgttactgagagaaaaatatgaaccccaatgattctagctttaaatccagtccccaaagaatagagactattctttactatatccgtcaaaataaatcgtaagtttttgcatctgtggcctcttaatatttatttccctagcttctatagaacttaaattacttgactctctttttatcatcaatagcaaacatagtaaaaagaattccaattgcaaaaattaatcctcctgccgcccccaaaagaatatttttctttacgttaattgtatttcctctcaccggcttttttgttttctccacaacaataggcctgtttttgtcaagtatctttgttattacctcatcagtagaagttaaaattgcatctgatatttcttttgttttattaatgtcagcactctgtgttttaattatgatgaaatgcgtcgactccacccgctccactgagatatactgtttaatttctgaaagtggtatttgagccttttgtgatgccttttccagaatcaaatcagattgaatcaattctatataatcctgcacaagttccgttgcattatctctaatcaaaactttatcagacgttttaggaattgtaatatataatttcgtcttggcagtatatactacattattttttgtttttgaaacaaccgctgtggctcctgttcctataagaacagcaagtaagataactacccattttgacaatacatatttcaccaattccttcacatcaatctccatttccttgtgactcatcttttttccttccttcatgcttttcaattattacaaaacttgttatttatctttttataatatagagtttctcataaacccatagatcttttgttcattatcaacaatttgacttctactatgacaattatttctttagcttatcttctagaactcctgcatcctgccatctataacttttccactttcttgtatatgatttccctgttgcaaaacagctatcattgaacaaaataatacattataatcctttttcgtttctaccattatcttgcacgcaaccttattagatttcttttacttaaccctgatggcaatataagcatttccattcttctttgtcatatactttatgaacgttctactttggattctctattttatcacagaagtaacatttctacaacatacttgaaaaatccccggatttttcttataattacttcaaatttcatttctatcctctatttttgtctgtattttatagcttgatttatgggctggacaaccatattgcatgaaatgattatctacacttttgattacaacacttcctgctccgataagacagtgagcccctacctttgtatattctttaattactgttcccgctccaacatgtgtttcacaccctacttctacgcctccacagagtttagctcctgtagaaacatggacgaactcccctattttacaatcatgttctagaatcgcaccagtattaatgatagcacaattatcgatttctactttcgaattaatcacagccatttttcctacatatatgcctcttcctagattagaccacttgcttactgtggcacttttatcaataatattaggaataaaaaatcctatatcttcaatcttctgaaataacttttttcttaccgagcaatcgccaatgcttcctacagtaataaatgcatgatggaaaccttcttgatacaaaagtggtaattcctcatcatttccgattacatgaatacctcctggcaaaaataaactattatcattatccagtacaacaatttcagaataaatatctttttctaatatactgtcaataacagatgcacagtgacccccgcctcctaataaaacgattttttctttacacatacttcccccttcatccctcaaacatctgctattttacatatctttatataaagaatcgggcaatatttcatcaacgtcaaagcgaatatgtgccttagtgataatattccaaaagaatatctaattttgaaggagtgaattgtggaatataaattttctctaatatcagcatattcttctggaatttcatgaaccatttcaagcttttctaaagttttatatgctgttctgatcaaatggcattctgcaacacgtctcaaatttggatagttagtcttaacttgatcacacattttttttgcaacattgtaattgactatatttttttcagtaaactgagaaaccattgctgatccatcacgtctgtcataaacataacaacatatatcttcgtataccactttattacatacattaatattctcaaatacaaactgcctatcttctccaatagcaatttttgtatcgaataaatgatctattacctgttcccttttgtatagtttatcaatacaaaggaaatcaaatcttttttcagataacatttcaaagatggcttcttgtctattccagacaaatcttctttttgtattatagcgctctactttcattccacttcttcggtgaattgaataaccaacacatgatatttctgcattttcctttttaatatttcttaatagaatttcatacatattattaatcacatagtcatctccatccaaaaatgcaatataagtacctttcgctgcatgaattccagcgtttctcgcagcggatacaccggagtttttctgatgtataacagagatatttttattattttgggctaattgatcacagagctggcctgaataatcagttgagccgtcatctacaagaataatttcaatacaatcacctattgattgggctaatattgaatttactgctctctctaaatataattccacattaaaaactggaataatcactgaaatttccatacgctttcctggcacactatataaagacaatcttataaattgaattcctgcttttgtaatattcgttgtccatgtttatacagccgtaatcctttcccttccctgacttttactattattatctctgtttttccctcatcattatttgaggcaaatgcaattgtatcaattgtattaaaatgtaaagtcttatcgtcaaacacataagtccatttacctttttgaagaccataatcccaattatcccaaaaatattgacctgttatagtctttatcgccaaaaacggctgtgttccaaaaatgctattgcgagccatgactactaattcacatgcatcattatcttggtctttggccagtttaacattaaattctggagctgctgcctctaacccctcagtctttttcatggcttcaattgcatcaacaaaatgatatttaacgtcaggatatttatctgccgtgctttttatcatatacatcgcattctcgacttccttatgcatgtctctaaagtcatgattggcgaatgacaaaatagctgtttctcctctatcagcttgttcaaatgcctctttgacatcctgtgtctctagtttagccacacgggaatctaaactaatgcatcttgtaatccatcgatgacaatatccctcttcctgatagtcatcatgtgatggatgataaggcctccatttcatagaagcatgtcgccagtcaccatatctaccgtctcttaagtccggctgacgtgatgaattctctctctcatatgagtcattggaataatcaaatggaatccactgttccaaaaaccaatgtgcatcaggtctttctgcttccataccagctcgataagatgccggaaatgcttgtttatcaattaatcgacgacacattatctcaaataaattgtttgaattaatataagatgtaccacaataattataatggccattaaagggtagtggatgatagtggaactgaagtaaatcctttttttcacaatgattttcttttatttttgttaaataatgctcataaatattaccaaaacctgcgtctctcctccttggattatttcctgtaaatccaacatgatctaaacaaaaccagttgaaaacccatccattgttttcagaatccaccactttattcctaaaagactcagacattaaatcatccaataccttatcaacttcggtccatgatcctaaagtagaaatacgattatctgcaaaagcatctgctactaaatcttcctttccattaaggtcaatctccctgttttggatcttgtttaaattcttacgtgttggttctaaatcaactccgaaaatctcctttagtctggaaaaggtagcctctaatgattcatataatggaccttccgtatctacacagtgcacaatatatacatcctttgacattttaatccctctctttcttcttaagattccaaaattcagacagcaaaccggccatcgaatcaaattcgtttttcaaataattcttactataagtactaggtggacaatctaataacagacttaacttgtctttaaaatcgtcatccgcatctggacagaacacatagggcaattgttctacccatttataacatcctctgaccttcccacttacattgtcaaatgctagtactggagtgccagaaataattgcaaataacattccatgcaggcggtccgttatcacacatcgtgctgattgaaattggtgaatagtacaaagaaatgatttgtttctcttcgctaaaggtacaaatccgcttataacagttgatatttcttttatattcatatttttagatttataataatttttaatgtactcagcaatatcagtatctataatcttttctttatcatttctaaaacataacagtatttttttagtatctatatcgtttttttcatacttcatccaaaataccatgtcaggaaacaagtgtatatcttctttcctatccaatccagtataaaccatatgataagattttttttcacgcaaacaaatttttaaatgtttatgatgattagcaatattttcaaacctagctttctctttttgatccttgaaaaagatactttgtggaaatattacaattttgttttcaggaaaagaatttagaatatccagaacaaactcctcttcatccatccataaatctcctagaaaaccaccacctgttatgcaaatgaaatccgttggctttataaattgaagaatcttagtcctaaaatacagccagtactcacgtggaatttcttttacatataactcaggaaaataataattgagaaaatctatttgtgcgattgagatggcctggtctcccatatttccatgaagcggtgaaccaaacaaataaagagttttttctctatttaattttggaatttgtttcaagtcattccaggcagctttctttctaaagtagctgactagcttcctcaaactcgtcttaacaatttttaaattcatttcattttattcctttagtctgttaattatcctatgagtaaagctctttaacttcacagttcggtttcgtttattgatttgtttttgtttctctaaatcatataactcattattatctgatagcttttgactaataaattcggagaataatggtctcatccatgtctcttgattagaatcaattttgtcacgtactttcaaatatgttggtgtatgtaattcaggtatatcccctaaggttaaaaaaacatgtccattgtaacagtgcggatactcacagttgtttccaacagcgcagactggaattctttgatcgggatttcgatatatatttccaagataatttccatagacacattgttttaattcaccgcttttcaaatttaagtaaagactccagtcacccgcataacaaaattcttttctctttttatagaaaatcgtcttcttaaaatcaagtaattcggaatcaaaagcactccatatttcaacaaactcgtcaaattcatattttgataagtgccgtatttcttttgttgtatcatctcttgctatcgttatgtgacataatgttcccagcttttcaatacatacttttttaacttcttcaatataaggaattaattcatcattgggagtaatctcaactgtaaaagaacaaccattttcgcgcattaatttaatattagaaaaaaatacatcaagcatatttagtctcaataattccaaataatgaaatgaaaatttaaaagctagacgatttttatactcctgcggccattctgacacctgtttaaaccttttacttatagtaccatttgtaaccaacataatataatgtccttcagcaaccaattctttggctacattcaatacttcctcggaaagtaaagtctctcccccggcacaaaagtttaataaacatttcccgcctagtctctccacacttaaagcctgtctaatttcttctggttttttatcaaatttcacaacattattattaaacttattttgctgagcaatatagcaataatgacattttaaattacatgtttctgtgggaatataacaatctatgtatttggttaatctatccatataatctcctatctaaatttatctatgatcagctttgaaaataatcttccatatttccatataaatatccctgctaaaacacaaacaattaaatatctaatcaaaacctcctcataaaacatactaatcaaacatcctgcaaagaatagaactaaacagactatactattataaaaataatttaaatcttttctcttacatataaatctacaaattactgagtgaaaaagcattaacacataataaccaacaaacgtagtgaatgcggctacgtaataaccgaacttttctaaaaatataagatttagtacaaaattaagtaatgccgccagcgcagagccggctgctatatatctagttttcttgtttatagtttcgacagcacaataattagtatagatatactggcaaaaggtaccgacaactataggtactatcatcttttgagtattccagtattgctttgcggacagtaatttaattacttcaggcatcacaaggatatataataaaacaacaaaaatcaacatatttaaaatgctttttaatctgatgcgaatttcctcatgaaatcctccagcatatttgtcatataaccaaggcttaattgccaaagatactgcatttgtaaagaaggcaagcatagtacccactgtatatccaaaactatataatccagtttcgctttccgtatagtactttgcaatcattactctatcaatctgtcctaacagaatcattgctagcccatggaatatcattggtaatgctataggcaaggcatacttcatatgctcaattattctgttccattgcagatactttaagtacttaatacagataaaagtcccaattatagctgttactattacaactccattaatccgaccataatatttgcttttactcattactaaaattaaaataatagataatcccgtagataagactgcccttaaagcagccattatcgtataggatttatactcatattgaatggacattttattacttgctatatccagtac

SEQ ID NO: 40 - DNA, 8049 bp, Anaerostipes rhamnosivorans
gtgttagtagcaacatggattctatataaaaagaataagctagagataatgcttttactgattatttatatgatatattttacgtttgaagcatattttcaagcggcatttgatattaagccgatcattattggttatgctttttatcagttcagtgatgtttctttttatagaaaaacaaggcgatcagtgagaaaaagaggatttgactaaaaatcctcttttattatatattctatgaagggagaaatcgtgaaagaatatatgttttatgctgttccaataattatgggcagcggattcaaaatatagtttgagatcggtgctaaaggaggtttgtattatgaaattatatattgtaatcccatgttataatgaacaagaagttctaccggaaacatcattaagattaaaacaaaagatgacagatttaatctctaaacagatgatttctgataatagtaaagtagtatttgtggatgatggatcgaaagatcagacttgggagatgatagcgcagttacatgatcaggatcctatgttttcaggggttaaattgtcttgtaataagggacaccagaatgctcttttggcaggtctaacgtcagttgctgatttagccgatgcagtgatctcaatggatgcggacctgcaggatgatataaatgctattgatggatttataagcaagtataaacaaggctgtgatgtagtatatggggtaagaagcagcagagagaaagacaccttctttaaacggtttactgcggagggcttttataagttgatgtcattccttggggtcgatatagtatttaatcacgcggactatcgcctgttaagttcaagagcattacagggactgctggaattcaaagaggtaaacttatttttacgcggtatcgtgccgatggttggatataaaagtgatattgtcacatatgagagggctgaaaggtttgcaggtgaaagtaagtatcctttaaagaaaatgatgtcatttgcctttgaaggtattacatcccttagcataaagccaattagattaatcttttcactaggagtaggaatctttttaatcagtattgcagcattaatttatagttttgtaagatacgtatccaacaacacggtaagcggctggacaagtttgatcatgtcaatttggcttttaagcggcatacagttaatggcaattggaatcattggggagtatattggtaaagtgtatctggaaacaaaggaacggcctaaatttattgtagaagaatttttgaatacaaaatagaaatcagcggggcagaaaatgaatcaaatacgaaaaggattatattattttatcacaggagcaatgtttgtttttgcagcatatttattaattacttttattggaggattgatcacagacagaaatattaaagttgatcatacaatagctgtgtttacatttatatttctgttatgtcttctcggatgtgtaatttattgtatatggagcagcaaaaccatacttgaatcaagaaagacaatatatatcattctatgtttggtcatattactacaggcagcggttgttcttgtgttgaagacacagccagtgaaggatctgctctttttgcatgatcaggcagtgcatctactgactaataaaaaagtatcattgacatatcactgggattatttcgcgagatatcccaacaacaatgcctatttattgatcctatcatatttctataagatctgtgtttggttgggggttcctgtaagcaagcttataattgccgggaatctgttgaatatgttttttattgatggggccatatatttcggatatttgatattaaaaagtattgaatcaaataaaataggtagattttttttgatgatatgttttctgaatccggaaatatatttatgggtgccgttttattacactcatacttgttcattatttataacagtagtatcagtctatttatgtttacaaatatataagtacagagataaaaagtcttatctttggtattcaggtattatcgcactggggatactgatatattttggatataagataagggcaacaaactttataacctttatagcctttatgattttttgttttgtttttaatacgcaaaagcaaaagataaataaaaaggtgattacaaatgcggtgaaaatcatttttttattttgtgttggaattggtttcacagtattgatctacggaaatgttcagtcaaagcatattggcagaaatcaagataaagaattgccagttacccattgggttatgatgggatcccatggcaagggaatgtttgatatggatgacctggaatttacgaattccttttctactaaaaaagaaaaagagcaagcaaatataaccagaacaatagagaattataaggaacttggggtttggggaactttagatctgtatggaagaaagctgagaacaacctgggcagttggtcatgatgattatccgaaccggctgtcagtgtcatctgattatgtaaaggcacatgattggattatcggcaggcagagcacattgttaatactttattgttatgcatatcgttttttgatgctgctattaatatgtatactgtgtctgcgaatgatgaagtcattagctaaagaatatttcttttttatccttattttacttggggcaatgatttttcattgtatatgggaggctaattcaaagtattcgttatgttttatggtaatcaatatgatgttaatgacaaaagggtttactgttttgagtacagcaccaaaacttaaaaatgataatagaagattaaaaattcgatgtttttttgtattcagtttgcttactttaatcagttctgtcattgttataaatagctccaaaagcttctacagcattgctgcggatcagcaggaaagtaccgggcctattcaggtaggtaaagtgtatggtgatcggataacgcaatcatttgtaacaaagaccaactttaatatgctgaggtttgctacttatgatgtatatccatctagcattttagggataagactgttgaatgagaatagagaagtcttggattatcaagttttgaaaaaggaagaattaccagaacatgaaaatataattattgaattcaaacacacaataaaaaatagttccagaactaaatattatattgaatttataaagttggaccatttaaagaaaagcgtgggtatttccaattattattcaggcaacattgatatttttcagaatggaaagtgttatcgaaacggcagagaactccataaaagggatttgcgctttaaagtatttgaggcaaagagcggaacattgtaatttctctaagatatgatataatttgaattgtctatattgaaaaagaacatgatattgaagctggaacaaataataaaagcatctagatgtgatattatttaaaattataggaaaggaagagaatgatatttagcttggctaaatatcataaaagaaaaatatgttttggaaaaaaatcttgaaaaaagagcagacatacccagaatttgaaagctttatgcggacaaacaatgaaacccagaccagaagctggtttgtaaaatattatgagaatgaaagagtagttgaaaataggattttttatgaatcatttcagggggctggcatgactgacagcccttacgcgttttttttgtatgtgcttaaagataaaagatattcagaatttcagcatatttgggcagtgaaagaccttgaacatccgttagtaaagaaatatgaaaaagaacaaaatataaagtttgtagaatataattctgaggaatacattaaagctttatgcggatccaagtatttgatatccaacaatacctttcttgagtattttataaaaaaagatgatcaggtttatgtgaacacatggcatggaactccgatcaagactttgggaaaggatataaaaggatcactgggacagcatagaaatttacagagaaaccttctacactgtgattactttataaatccgaataagtatacagcagatatcctgctgaaatcgtgtgatgtcgatggagcatttccaggtaaggtcgcagacataggatatccgagggaagactggatatttaatacagaaaaagaacaattaaaagacaggctgggaattgaaaaagataagagggctgttttatatgctccaacatggagaggtgaattgggaaatgtatcaaatatgtccatggatgtccttaaaagggtaggagagttaaaggcaggacttccagatgactgtgtattgttgcttaagctgcatcatatgatgaatcgctatttaactgaggatttaaaaaagttatctataccggaggatgttgagataaatcaggctctatctattacagacgtcctgattactgactactccagcgtcttttttgattatatggttactggaaaaccaattcttttttatgcttatgatctagagacatatgaaaacgatagaggcttatatgtagatatgaataaattgccgggaccggtctgcagatccacaaaggaactgatcgacgctctagcagattgtgaaagtatcaaagaaaaatataacgatacatacaatgcctatttaaaagaatattcttataatgatgatgggagagcgtgtgaaagattagcggatctcttatttcatgacaagtatgataaggaaaaagtgtactctgaaatggatcaatccaaggctaggatcttatcctatgcaggtgctttcattaacaatgggatcacaaattcgatcataaatttatcaagaaatattgattattctaagtatgatatttatctgatcttagataagtatgatgatgcaaaacgccataatatcgaaagattagatcccagggtgaaagttttctataaaattgggaattatggattcttacccgaagagtacatgccttatctgagattaatttcagatggaataggaaaacaaggctgcaaaccagaggagattccggtaaaagtatttgagagagagaagaaaagattatttggaaacttgaattttcaacatggaattgattatagtggctatacgatgtcatgggtatgcttttttgcttacgcaggattccctgataaaatcatttaccagcataatgatatgaagcaggaaatgaacagagtagtaaatggaagaaagccgttggaacagaggctcaaaactatatttactgcctatgactgctttgacaaattggtttcggtttctgaaagtgtggaagccgctaataaaataagtctcgcagagacaacaaagacaggacaggacaaaacatttattgtggaaaatacattagatcctgccaatattaaaaatatggctgaaacaggttttgaatacacgtattctggaaagaactattttagtgagaactataatattacaaagaacagatttgaatttgaaggtgtggagatgccgaaacctgaggatattaattttgtctgtattgcacggctgtcatgggaaaaaggacagaagaaactgattcaggcttttgagaaggtgaacagcagattttctaatgtcaaattatatttaatcggggatgggcctctgagaattgacatacagaatgaaatcagaagactaaatttagaagacaacgttgttatgacaggtcatgtagcaaatccattttatttgctgaatcacatggattgttttgtattatcttctaatcatgaggggcagggtttggcagttttggaagcaatggtagtcggaaagtactgcatttctactgatatcgacggaccaagaagctttttaaagcctcaatatggtgagttggttgaaaatagtgtggacggtttggcaaacgctatgatatcttttgcagaacacaagaaagtgccagaagtatttgattatgataattacaactaccaggccttaacagctttttacaaaatgatcgaggcctagtgaggaggaagtttgatggatgaaaatctgattttggaaaaagatctcagaaataaatatcaagagaatgtcaaaagaaaagagcagttttcatatggtgcaatgtattcaaagtctgtaaatgattttgatattgatgagaatatgattttttatgagtctggatttggaaagaatacaactgcaggcccatattccatgttcagaacattgtatcaagataagaaatacaaaaaatttacacatgtatggtcattggaagcgttatcgggagatgtgtataatgcatttaagcgaaagaaaaatgtcaaattcgtgattcggaaatcaaaagaatattttgagtacttagctaaggctaagtatgttattaataacaggcaaatgcccttttattatagcagaagagatggtcagtattacatcagattagtgcagaagtttgatgattttatgtttaagagcaggtatttcagcataaaagaaatgaactttatccgtaatttatatcaggcttctcatctggtatttgacaatgaaactataaaagaaaaggtgatgtcaattgaacagtttaaggatacttatacaggaaatattttagtacatgagataaaaaagtgggatgccgttcatgagaagccttcagaatttgcccaaattataggggagtctgttattttatcaaagtgtccttctgtatttataaaaaatgatgtgagaaataaaagtaacattttattgtatcctgggaaaatgaaaccaggaggtctgacgaattctttgatcagcttcttgaatatgatcgactacgataagaacagagtttatttagttgccgataagacaggggagcaggaagagcaggaacaatttgaaagaatcaatccaaatgttgttgttttcgttcggtatggttcttcaggttatcaggaagaagagtttgtccaggtacagaaaatagacaaaaccggatttgaaaagggttcaggcaaagaggaactttttagtttttaccgcagagaattaaagcgcatttgtggcagagatacttttgaatgtgcaatagatttcagtggttttgaattattctggagttcactggttgctttttcagatgcaaaaatgaagtccatctttctgcatacagatatgaaaaaagaggctgaacgaatcttggagacggatgagatcaagggaacacgattgttaaatcttttttcactttatccgttatttgagagaattcttgctgtttcatcaggatgtatggaagtaaacaggaatatcatagatgaggacacacaacaaagattaaattttattcctgacggagctgatgcgtcagaaatattaagtatggcggaaagcaggacacatgagattacgctggatgggaataaatattctgtagtagaagaaaaaaattctgaccataaaatccacttaaacggatataaaacagtagataaagataaatataattttatctgtttaggaaagttatcagaagaaaaaaattatggtgcgatcctcgaagcattcgcagaggcgaagaaagaaaacaagaatattgcattatatattgtaggtgaaggtgacgaacaaaaaagtattgaatcacagatatccaatttaggcctagaaaatgatgtgactatgacaggatatttaaataatccttatgttctgctgaaacaatgtgactgcctagtgatattttcaagatatgaaggatttggactgcctgtcctagaggcagccattctcaataagaaaattattgcttctgatatccctggagtgagagacattgtggagacatgtaatgggactctgatcgacagtaaacaagaagccttggcagccgaattagttcgagcggcagagcatgaaaattcagatgatcgaaattttgattatgaaaaatatcatcaggctgttgaagataaaatttcagaattaatattaatgtaaggtaaattgcccataaaatagtatttaagacctcttttcattttatttattatatatattg

SEQ ID NO: 41 - DNA, 5777 bp, Anaerostipes rhamnosivorans
tttttactccggtataaaccctctgctcccatgtgcagatcgcacatgcatctgtttttaccagaaccatatcgtcactgacttcaggaatcggatattcctgtatctcaatttgtttctcccctgtaaataccagggtctttgccatttctcccattgtttttccctccacgaagtttctgactatttctacaattatgcacctaagaagccgactgcaccaagaacaactccgatgattaccaggatcaacataactgtggtggctttcatcttcttattcttcagcaagaataacgtaaacagggttacggccaaaggcaaaattccctggaacagctggtcaaatactttctcctgtacattcatctgcaatgcacccagtttgatgatcgcagaacacttaacggttacgaactgcgcagacagagcacccagaacgatagcacccatggctgacgcacctgtgatcagcatctgcagctggtttcctccaaggatcttttcaattccttctttacctaaactataacctttcatccagcagatatatgctaccgggaacatgattccaaacattaataatgtatatataacaggtcccaagaggttaccctgagaaccaaggctgataccgaatgccagcaggatcggggtcaaagtaccctgccataaggtatcaccaataccggcgaacggtcccatcaaacctgtttttacaccgttgatcgcttcatcagtgatcggtgccccattggcgcgctcttcttccatcgccagaacaataccagggataacacctccgatatgcggctctgtattaaagaactgcatatgtctttggatacatgctttgtactcatccggtctgtctccatagagttttttgataactggtttcattgcaaataccagtccggttgcctccaaacgctcatagttatagtttgcgtgagagaagaaggtccatctccagaaggcttttacgacttctttttttgttaaacttcttttttcttcagccatattaaaaatcctcctcatcgtcatcttctattggaacagctccacccgaatctccagcggctgctgcctgcggtgtctggttgctcagcatagtgtagaagtatccgatcacacctgccagtacggctacagcgataactggaagcttcaaatatacgaccagaataaatcctacaaggaaaaacaaaagtgtaccaggccgtccaattgcacggaggttcattgcgataccaagtgcaggaagcagtcctccgattacggtcaatacagtaagcggccttcctgtcagagaatcaatgattcctttcactgcagtagatccaaaataagttgctgcggttgccggaacgacacagagcaggaacataaggatttgaggcggtaccacatgccagaagcatattttctccagattcccttcttctgctgccttatctgccatatgtacaaaggtaacatccaacgtcatatgtgcaacccacaccattgttccaagcaatccaagcggaagtgcaattgttactgctgctgccgggttaacccctgctgccatggcccatgcggttccgaccgttcctgcaagtccaggatcctgaggagctgttcctccagcggaaatgaacgccacatacggcaggttgattgcagcaccaatgatacatccctgtaccggatcacctaagatgaatccgactaaagtaccggctaccaatggtttgtagactacggaaatactacccagcaatgacagccatggtgtaccgatattacctaagtaataaacgataccgatcaaaagcgcttgaattaatgtaattttcatacttaacctcctttattcgtcgctttcattgatagtttctcatatttatcttttgcgttccttaagtaagtctttgcttatgtccctcttaaaccatttttgaaatgtctgtctcactgtcctccgcgatgatcctcactccaatcttggaacctgcgtctattaattctttaaagatctgtctttcttcctcagaggcagaaatgttgcggaagaattttttacggtcaccgctgactcccattcctccgatattaatgtgatcaaacacgatgccctcttctttcagacgctgcaaggtttttggatatttcacaaggataatacattgatctcctgcaaatccctttttcagccttactgctgccttctccactgtgaatgttgcaagctttacatttgccggcacgcatgttttcaggacacttttcataaatgggtcatttgcaacttcatcatcaataatcatgatcttgtttgcactggtgtaattcagccaagaagtcataacctggccatgaatcagtctgtcatcaatccttactaatacaataccttcgatcttcataatactgctcccttcgttagaaaaaaattgaactcttactcattttattgtagttgcttgatacaaccactggttatatcctatattaccactactcataaaaaagtcaactttttttcatgtatttcagtttttttgtgaaatatgccttaaatctataaaaaaactataaacattacacaaactttattaccatcgattatatttattgctttttcattttttctttcttatactgaaggtaaatcttaatacacagcttaataaggtacatctattttattatagaagaaaggaaggttttatttatgagaaaggtaacactgaatcccccctgtgtttctgcttccgtatcctgtatggatctgctccatttaagagaacagatactggagacagagcagtccgatatctcttttttccattatgatatggtagacgggaagtttaaccaatgttttatcttgggagacacattattagaaatgatacgtccggaggtaaccctgccaatcgaagcgcatctggccgcttacgatccagacctctacgtcgaacgattcgcaaagcttggcgcagattatattgcagtccactatgaggcgatggagcatcctttaaaaacgtttgaactcatccggaaatatggtgcagaacccattttagcttttaaatgtgatactgctcctccagaagattttctttctctggcaaaagaagttccatggatcttaaagctgacggtgaatcctggattctctggacagacgatgcagacgaacagtctggaacatataaaggaaatgagagaaaaactgtctgatgcgggactttccacttccatccaggcagacgggaacgtaaatccttctactatagatactctgtacaaatccggagcagacatcttcacaggtggaacttccggtctattccggccggaacacagcattaaagaaaacagagagattcttctctcaaatatcaacatacaaacaaaatagtatgaccaatggtaatttaccatttgactttattattaccatcggttataatttttttatagccaagtaatagatgattcacggaggtagaagatatgttagttactatgaaagaaattttaggagatgcaaaagagaaaaaatatgctgtcggcgcatttaacgttccaaacctggaatctatacaggcagtgatctccgctgctgaagaactaggtgttcctgtcatcattcagcacgcagaggttcatgaaaacttaatatctatgcaagagatcgggccaatcatgctggactacgcaaaacgtgcttctgttcctgtttgtgtgcacttagaccacggcgcatcttttgacttgtgtgtacaagcgatccgtttaggattcacttctgtcatgtatgatgcttctgccaaaagttatgaagaaaactttgaagagacaaaggaaatggtaaaaatcgcgcacgctgctggtgtatctgtcgaggctgaattaggccacatctttacttctgctgtaggaggcggagaaggcaggggcgctgtaggagcagacgattttgaatcattagaagactgctatacagatccagacactgcaaaagcatttgtggaaggaacggatgtcgatgcccttgctatctctttcggaacgacccacggtgtttatctgacagaaccaaaacttgatttaaaccgtattacagagatcaaaaataagatcgatattccatttgttatgcacggcggttccggtgtatccgacgaagactttaaaacttccatccagaacggaattactaagatcaactactatacatacagctcaatggccggaggcaataaagtccgtgaattcatcaatgctgccggggatgaaaaagtattcttccatgatatcatcgctgccggtaaggaagctatgaaagaaaatgtaaaagccgcaatgaaagtttttgcaagcagcatcttagactaaatcaggtaactctaactcatttttattggttgggcatccgcaattttgcgggtgtccttttttaattaaaaagcggtcaatcctatagactgaccacttgttgtaaatggtatattgaactgataaaccggaatctacagattcttttctacaaaatgggtatcgtacatattccaatatttttgatacaccctgtcaccttctccatcgatattcaattgatacattctaaacgtaaccaaataatttttgggctgccattgttccttgtaagaatagcaatatctcattcctatctgccgcattacaccgccgcttctcggattgtttatatcgtgtgttgccgtaatatatgggacaccgtccttttttaactgttcaacaagagctatacttgcttcagtaacaattcctctatgccagcactctttttgaagtgcatatccaaaatcatggctgtcatctgtatctacttttacataaccaattggaaaattatcttcttttagacaaatcgcaaagtagtactccctattcgcaaatcgctccttataaaactccttcgcttcgtctaaatcatttactggataccacggcaaaaacatattgacttcttcatctttcaaaagtaaaaacagcgcttccatatctttttcttcatatttccttaatataagtctatccgtctcaagttttgatatggccattatatttcctccgtagaattctaatttatagcgatattatataatattttaataccactgacaactaatcatatacttataaaaagtttcatcctcattcgttcattcccttaagtaaaaaaatacagccgttgtatcccggctgcatctttttatatttattagatttcgtcttcttctgtttcctggctctgctgttttaccatgtcggcatacatgtcgtgtaaaagaatcgggggctgattgccaacttccacacattccgcacacagagagtccagatccattccatctctcatcatgactgcctggactaccattgccatattcattcctgcgatagctttgatattgtcctttttggaaaaacaacgcatgactgtattggaaggagttccacctagaatgtccacaaagatcaaaactccgtctccatcatccagcttgtccatggcagctgtgatctttccttcaaattcatctaccccgtctccgtgatacaatccaacagtttccaccttttcctgctttcctgcaatcaattctactgcactcaacagtccttctgcaaatcctccgtgtgtagcaattaaaataccaaccatttttatcctccttgatgatacattgtttgttactattattatactatattcttcaacacattac

SEQ ID NO: 42 - DNA, 5245 bp, Anaerostipes rhamnosivorans
gaaaaaatcaacactcttagtagcaatttatattctgtttttagacgaaaaatttgggagttataagtatacaatatgagctttaaatgcttatattatgttaatgaatctcttagattgaggatataagattattcttgtattagaattataattaagatataataaaatataatgcctgcataaatattttgttgcgggcattttcaaatggaaggattacgtatgattacaaagaaggaaatacaagatacttataaaatagttcaaagactatatttagaagacgagatcccatgggttattggttactctggggggaaagatagtactgccacgctacagttagtgtggcttgctttatctcaattgtctgtaaaagagagaaatcataaaataatacatgttattagcacagatactttagtagaatcaccagtaattgcaaaatgggttgagaattcgttaacttttatcgaaacagaggcccagaagcaaaatatgccctttaagaaacatagacttacaccagaaataaacgacactttttgggttaacttattgggaagaggttatccgtatcctcgtgttaccatgaggtggtgtactgatagattaaagattaagccctctaataagtttgttcaggatgttgtatcaaaatatggagaagctattttattattggggacccgtaaagctgaaagcaaaaatagagctcaaaatatggaatattatgaaaagatgagagttagaaattatctaagtcctaatggaagtatacaaaatgaacttgtcttttcacctctcgaaaattggagtgacgatgatgtttggtattatttattgcaatataaaaatccctgggggtattcgaacaaggatctaatgggattgtatagaggggcttctgcagatgctgagtgtcctattgttatgtcatcagatacaccaagttgtggaaagagccgatttggttgctggatgtgtactatggttgaaaaagataagtcaatggaagccatgattatgaatgattcacaaaaagagtggatgatgtcattactggaattccgaaatgaaattggtgatataaaaaaggatagacaacgtcgagattttagaaaaatgaaaggaaatgtatttctttataacggaagattagtacacggaccatataaaaaggaaataagagagtcctggcttaaaaaattattagaagtacaagagcatataaataaaaatggacctgaagagtttaggaatcttagtttgataacagatgaggaattaaataaaataagacagatttggctggaagaaaaacatgaatttgaggatagattgcctaaaatatatcaagaagttacaggtagaaaattaaatctaaaacaccactttaggagtgcatataatgataaggaatgggaggttttaaaaaatgtttgtttagaggaagaaccagaagaagaattggcctttgaattatcatatcgattgctggatatagaaaataggttttctactttacagaaaagaaaggggatttataatagtttagaatcagaaattaaaaaatgtttttataaaaatgaagaagatgcagaaaattatgcatttaaaaaattaaaaagaaaaaaggaaatgggagtatcctttgacctgaaggcgataagggaagaagaacgggctgaatgggaagaagatggaggagcttaaaatgaagttaaaaaaattggtactccagaatataggtgtttttgtagacaggaatgaagttaatttagactgcgataaaccgataattttaatagggggaatgaatggacgtggaaaaactacgattttagaggcggtcttattcgcactttacggtcaatatgtggggaacctgttaggtaactctttaaaacttactgattacctttataaaattagtaataccagaggtcagaacaaagattgctatgtcaagatagaatttgaaattcagacagaagacacactgcaaaattatactgtaaagaggagctggaatgcagggctaaaaaatataaggttgcagacagaagtatgcaaaaatggattaagagataatactctttcacaaaattgggacatgttcattgaagaaatccttccacacgctatagcaccatttttcttctttgatggggaaaagattgcagaacttgcatcttctgaaaatgatgagcagataggtaattccattaagggtttgttaggaatagacgtaatagacaggcttattcaggatttagaggttgtagaaaatagaaaagaaaaagaaataaagaataatctttattctacagaattagcaatggttaatcaacaaagtgaagatattaaccgattaattatcaaattaaatcaagaaattaaaagtaatcagaaaaaaagtgagattttacgattgagattaaaagaattagaggagaactattctataataggagggagttatgccgagaaaagaaattatacagagaaggaatatcagacttttcaggaaaaaaagaagaaaattgataatgatttagttgagttagccatgggggatctgccattaattttgtgcaaagatctgttatattcaatttttgaaagagtacaagaagaacgtgaacagaaagaattacacttacttgcccagcgtttgcctttaatatatgaggaattctgtagtaaaaataatagtattgagaatatagcaagttttttgaattttgttaaaacgaaggcaacaaacgagacttacatttataagtttgaagatgatgcatatttcagattaaagaagttaaataaatcatttaaatcttcatgttctaaggccttaacgcttatagaagagaaaagaaagattgaaaagaaattagaggatttagaaaattatcttttaataaaagtagatgataaacaagtgaattctttatttcaaattataaaagataaaactgcagaaaaagctattatcgacgaacgtatagtgcaagaaaatggggaactagaaaaaagtttacaacaacttaaaacaattaataataataaagaccgtttattaaataaagttgttgaaggatatgaaaactctgatgaggcaaagagaataattaattatattcaaaaacagattgggttattgaagaaatataaattagaagttcaaaagctaaaagttaaagaattatcgcagcaaatgacaaattgtttcaaaaatttaattgcaaaagaaggattaataaatgatattattattaattcggaaactttgagctttacatattacaatagcgaagggcaaaaagtcaacaaaatggctttatctgcaggggaaaagcaactattagtaattgcaatgttatgggcattagcaatttgttcaaaagtcgaatttcctttggttattgatactcccctagcacgtctagattcagaacatagaaatagtttaattaggaattattttccgtacgcaagtaagcaggttattattctttccacagatcaagaaataacagatgatgattattctcaaataaaaccatttgtgggaagagaatttacgttagaatatcaggaagacgaaaagaaatccataataacagatggatactttgggagaacataacatgattgtaaaacaaattaaattatcaaaccaagataaagataaattatcaagattaaaaggaaaaacagggataaaaaattggaatatcttatgtagatgggcattatgtatttctttaaaggagccctcaattccaaatgatacagagattttacaagaaagtaacgttgaaatgtcttggtcaacttttgcaggagataataatgagatctttgaggctttaataaaagctagatgtatccaagatcaattgccgactgatacggaaacattagcgaaatattttagattgcatttaagtagaggaatatcgtatttgtcaggtacaaatatgataaaaaatatagatgatttaattttattggcgttagaagaaagaaaggataaaaatgaagatgagtatttatcttgattataatgctagtgcaccaattgataaatcggttcttgaagttatgatagaaacttatatgaaaagctatggaaatgctgatagccgaacacatatatatggaaatcaggcgagtgctcaagtggaacgtgcaagagagcaggttgctgctttgctaaagattagaagagaagaagttatatttaccagcggttcaacggaaagtaacaacatggccatattaggaatgagaaattatgctatccaaaataataaaagacacatagtgacatcaacaatcgagcataaatctgttttagagccgatcaaacaacttatgaaggaaggttttgatgttgattttgttaagcctaatagaagtggtcgaattgaggcgaaaaaagtgttggaaaaagttagggaggacacttttttagtaagtataatgcatataaataatgaaacagggacaattcagccagtaaaagaaattggagattatttaaaaaggacagatacttggtttcatgttgatgcagctcaaagttgcgggaaattggtagtagatttacagaacttaaattatgatttattatcaatttctgcacataaaatgtatggaccccaaggaataggtgcccttattagaagatatagagacggaaagaagcctccattaaaagcaattatgtatggaggaggacaagaaaatggcctaagaccgggaacactgccagtagctttaattgtagggctaggacatgcatgttcattgagtttaaaaaattcaacggaatattgcaagttatataagcaaaacgagaaggatatacttgagttattgcagaatagtggaactagatatattattaacggagatttaaaatatgcatcaggtaatacattaaatattagctttattgatattgattctgaagcttttatgctattagccaaaaatcatgtaggtgtttctaatggttcggcatgtaattcctcctcacgatatgagacgagttatgtgttgaaagagatggggttagatcagaaagttatagaagaagcagtacgtattagttggggaagaaagaaattagatttctcagaattgcagaaggtattaattaaggtaaaagcatgtcaagaaacttaaaccaatgaatatatacctaattctattccttaaatatactgac

SEQ ID NO: 43 - DNA, 4784 bp, Anaerostipes rhamnosivorans
tgaacagctctaacaaacaccatttcatcactccaatctgaaatttaggtatgaaaaaagcagtcaatcctaagactaactgctttgtgtatagagatatgaaattgtgaaatagaatttgcctatttcaaatcaaaaagagaattttcatagtcctttacatagtatcgtatatttttacgccccttttgaataatggtatgtccctctgcttctaatttttctttctgtgcttcaataccatttggatatttagcatttaattctccgtttgcttttaatgttctccaatagggtgtttcatcttcggaacgctgataactcgcccacgctacaatagaaacaaatatacccgctgtaatcggctctgtaaaatctgcaccactcaattttgcaaagtgttctcgtatttttccaaccgtaatcactttaccatacggaacttttttcattactttgtcatagtcaatcgggggagcaaaatacattttgtttccaccatatttctcaatacttttctggtctatgataatttgaaattttggcatatccttactatcatgcaacatagcattaaaatcttttttatcttcatttgccatttgtgccacctcctactttaaggatagtctgtttcttatttccatgcaatgaggctgtttgaaaattattaacactttcaaatttgtcgctttcttcatatccatattataacagttccatatatccgccacaataaaaatcagcatacccttagcatttatggaacaaaaatgcacactttttctttcttcctcttgattaccccacaacagaaaagaaaaagccctgtcaagagccttgccaccattggtggtgctttgcactctttactgggctttttgtttgctgtatcttccatgcaagaggaaattaaagacctctgttccatttcgcctttagataatcttcatagtctgcttcattgaagtctacttgtggagaagtgtcgggaatgttgtttctgttgtctatatccgcaagctgacgaaatatccaatcatcataagggtcatggtatttatactctttgggctgttctctgtatcggtctaaccctcgcatttccttatgcacttttatcatgcgttccagtttttgacgctgtatcaactgcttgatttccataagttcttccaactccgtaacctcattggtaatgtagttatggatatactgtatgagtttatatgccttgtaaaatgtgcattctttttcatcatcgaaaaattcattttcagacaggtaatctaaggaaacattgaagtcttgttcccgtttgataatatccatgatatagggctcggtgtggtcaatatacttccattctcccgacaataattcattgggcgttacacccagcacgtccattatcttctctaacgtatcaaaggtaggataattcacgccacgttcaatcttggaaaggctctgcatattgataccgattttgtccgcaagttcctgttgtttcattcctctgtgttttcttatggtctgtatgttttctcctaagaaactgattttcttttcataatgctccataacttagtataaccgctcctttcgttgcttttcttggtatttataagcatatcatacttaatctatatctaaaagtcaacaaaaacttcttgacaagtaattctaatggagttattatcgtattagacagagtgattaagcacgctagggtcaatcacacgcttgagtaagcatataaaatacatattttcactttgatagcatgaataagcatggactatcagaccgaaaataaggtttctgactggggctgttccgtttagccacgagccttacaaggctcgtgagcgttaagaacggggcagacacaggaagaaagggaacgcctttaggcgttcgtaaagggcgtatatgtaacaccgccctgcgtatacatgtcatagtacctagaaactgtgataaataaaggaaaaaacacaatttttaccccgcaaaaaacggggcatacgaaaggagcaatgcactataactacacacaaaaatttatccgttaagattgattacatcagcattgtatttgataccgcaaccgctgaagatgtaatcatgcacattttagatttaccgactgatattttcaatgtgtatccagcaacgataaaattcaagacttatcaagcacgctggcagattggagatatttatgtatcgggggacgcaagaaagacagaggacaacccacaggggctaggctgttatcttgttatgactggcagaggttgtgatgatattttccgtattctcgacagtaggaattatacctttggagatatgttccgacgttgtgagcgaagatacggacgggataacttccatttcacaagacttgatattgccattgatgataagaacgaaaagccattctttaccatagagcagataaagaaaaaatgcgaaaaagaggaatttatctcgaatagtgagggctaccacttcgacgaaagcaagtttgacgatttcgataccgcaaaaaccgtttatatcggtgctggaaaatcgggattgtcctaccgcttttatgataaggataaggaagtctgttcaaaacatgataagacgcttgatgaagtcggcagttggaaacggacagaaatgcaactgcgtgatgataaggctcatgtttttgccatgacattcaaagacagaccacttgaacttggggaactggctttcgggctattggcaaacaacctacgctttgtcgtgccaaacagaaatgaaagcaataagagcagatggaaaacgtgtcggttttgggaacgctttttaggggctgtggaagtcttgaaactgcaagtgccgaaactacataattcccttgaggaaacacagcaatggcttacagagggtggcgtgatttccgctgtcaaaagtttttacttcttagaagaacatgacgcattaggcggactggaaaaagtgggaactatgctcgataaggcaagatacagcacttccctttccagtaaattaaccgcccacttacagaggatagaccgcaccgaccttatcccctatatccagtatgacacgaaacatgggaaagggggcatctgatgaataacaacgatattcctgtatgggaaaaatacacccttaccattgaagaagcgtcaaagtatttccgtatcggagaaaacaagttaagacgcttggcagaggaaaacaaggacgctggctggctcattatgaatggcaaccgcatacagattaaacgccgacagtttgaacaggttattgataaattggacgcaatctaatgcaaatgagccttgtatgtgttatgatgaacacaagtcatatcaaggctctttccaacaaggaaaggagcagacaccatgaaagaaaaaagacgggatagcaaaggtcgtatcctgcatactggagagagccaacgaacagacggaaaatacttatataaatatgtagacgcatttggaaacacaaaatatgtgtatgcttggagattgacacccacagacccgacaccaaagggaaaacgggaaaaatcctcacttcgtgaactggaacagcagataagacgggatattgaggacggtatcgacagcacaggcaagaaaatgacgctttgccaactttatgccaaacagaacgtacagagggcaaacgtgaagaaaagcacacagaaacaacgggaacagctcatgcggttattgaaagaggacaagttaggtgctaggagcattgatacgataaaaccctctgacgctaaagaatgggcattacgcatgaaagataaaggcttttcctataacaccattaacaaccataaacgctcgttaaaagcgtcgttctatatcgccatacaagacgactgcgtaaggaaaaacccttttgatttcaagttgagtgaagtcctagaaaatgataccaaagagaaagtcgcattgacagaggaacaggaacaagccctactctcattcatcaagacggacaatgtgtatcacaagtattatgatgatgtgctgatactgttaaagacaggacttcgtatctcggaactgtgcggactgacagtagccgatattgatttccaaaatgaagttgtgattatcgaccaccagttattaaaaagcaaggaacagggctattacattgaaacgcctaagacaaaaagcggaacaaggcaagtaccattaagcagagaaacgatacaggcatttcaacgggttatgaagaaacgcccaaaggcagaaccatttgtgatagacggacggggcaacttcttatttgtcaatcacaaaggcaagcccaaagttgccattgattacactatgctttttgtccgtatggtaaaaaaatacaataagaaccataaggacaacccattgccacatatcacaccgcatacactacgccatacgttctgtacaaggctggcaagcaagaatatgaacccgaaagatttacagtatatcatggggcattcaaatatcagtattacaatgaactggtatgctcatgcgtccatagatactgcaaaatcagaggttcagcgtctaatcgcataagaagtatttaccacgattttaaccacgcttgatagcgaaaatataagaagatagacctagatatgtgaggtttaccacaaaagcaaaatgcccgtagagccgataaaataaggctttgcggacatttaagaagatataaaaagatagtcaaaaagacatatataattt

SEQ ID NO: 44 - DNA, 3084 bp, Anaerostipes rhamnosivorans
cggatgtaccttgaaaacttcatacagaacacaaaaagttattattataatgacaagacatcaaacaaaacaattacccgttgtgatcacgctagatcacaatgaggatgatagaacactatcgtccgttctatggttaaagtagaaagagcgtagggtggatgccttggcactaagagccgatgaaagacgtgataagctgcgataagctgcggggaggagcaaatatcctttgatccgcagatctctgaatggggaaacccggcggaggattcctccgtcagcgtatggtgaattcatagccatgcgcggggaacccggggaactgaaacatctaagtacccggaggaagagaaagaaacctcgatttccaaagtagcggcgagcgaaatggaaaaagcccaaaccaggatgcgtgcatcctggggttcggactgcaacatgggattatgtatgacaggagagcggcctgggaaggccggccagagagggtgaaagccccgtatccgaagtcagaagtaccctagcagaatccagagtaccacgagacacgagaaaccttgtgggaatgagcggggaccaccccgtaaggctaaatactccttagtgaccgatagcgcatagtactgtgaaggaaaggtgaaaaggaccccgggaggggagtgaaagagaacctgaaaccctatgtttacaagctgtggaacctccttttgagaggaactgcgtactttttgtagaacggtccggcgagttacccgtactggcaaggttaaggacttaaggtctggagccgaagtgaaagcgagcgttaagagcgcgttttaagtcagtgagggtagacccgaaaccgggtgacctatccatgtccaggttgaagcttccgtaagaggaagtggaggaccgaacccacatccgttgaaaagggtggggatgaggtgtggatagcggagaaattccaatcgaacccggagatagctggttctcctcgaaatagctttagggctagcctctggtaagagtctggtggaggtagagcactgaattgtctagggggcgtcaaagcttaccaaaacatatcaaactccgaatgccatacagatgatgccagggagtcagactgtacgagataagttggacagtcgaaagggaaacagcccagaccaccagctaaggtcccaaagtacgtgttaagtggaaaaggatgtgggatttcagagacaactaggacgttggcttagaagcagccatacattgaaagagtgcgtaatagctcactagtcgagagatcctgcgccgaaaatgtccggggctaaaacacgacaccgaagctgtggaatgtattgatacattggtagaggagcattgtaaacgggatgaagccataccgtaaggagtggtggactgtttagaagagagaatgccggaatgagtagcgagaggaaggtgagaatccttccggccgaatatctaaggtttccagagtaaagctgatctgctctgggtaagtcgggacctaaggcgagggcgagagccgtagtcgatggacaactggttgaaattccagtaccgcataaaaacagaactgtggggacacagaagggaaatgggagccaggaatggaaagactggcgcaagcagaggagccgtatgggaggaaaatccctcatgcaaggcaaagctgtgacgcggaccgaacaaaagtagggaagcccaggcccccggctgtcaagaaaagccactattgttttttatgcgcccgtaccgtaaaccgacacaggtggatgaggagagaatcctaaggccgacgggagaagtgttgttaaggaactcggcaaaatgactccgtaacttcgggagaaggagtgccatcgaaagatggccgcagagaattggcccaagcaactgtttagcaaaaacacaggtctatgcaaaaccgcaaggtgaagtatatgggctgacgcctgcccggtgctggaaggttaaggggagggcttagcgagtgatcgcgaaggtctgaacttaagccccagtaaacggcggccgtaactataacggtcctaaggtagcgaaattccttgtcgggtaagttccgacccgcacgaaaggcgtaatgatttgggcactgtctcaacaacacacccggtgaaattgaaataccagtgaagatgctggttacctgcgccaggacggaaagaccccatggagctttactccagcttgatactgggattcggtactgcatgtacaggataggtgggaggctgtgaaggaaggacgccagtccttctggagccgctgttgggataccacccttgcagtattggatttctaaccaacagccgtgatccggctgggggacaatgtcaggtggggagtttgactggggcggtcgcctccgaaagggtatcggaggcgctcaaaggtcttctcagaatggtcggaaaccattcgcagagtgcaaaggcagaagaaggcttgactgtgacaccgacgggtggagcaggtacgaaagtaggacttagtgatccggtggtataacgtgggattgccatcgctcaacggataaaagctaccctggggataacaggcttatcactcccaagagttcacatcgacggagtggtttggcacctcgatgtcggctcatcgcatcctggagctgtagcaggttccaagggttgggctgttcgcccattaaagcggtacgcgagctgggttcagaacgtcgtgagacagttcggtccctatccggcgcaggcggaggaaatttgataggagctgtccttagtacgagaggaccgggatggacggaccactggtggatctgttgtattaccaaatgcatagcagagtagccaagtctggaagggataaacgctgaaggcatctaagcgtgaagcccccctaaagataagatttcccatagagtaatctagtaagaccccttgaagacgacgaggtagatagggcagaggtggaagtgcggcaacgtatggagctgactgttactaatcggtcgaggctttaaccaaagaaggtaaggaagatgtttgatgaaaggttctgtatgtagttttgaaggta

SEQ ID NO: 45 - DNA, 2717 bp, Anaerostipes rhamnosivorans
ctaaaggtgacaaattccgggtggtgctgagatttagatgaaaaaagacttttacatagcttaggaaaggaatatatagcatatggacttaatattaaaaaaccgtacagccattgttacaggcggaggaaaaggattcggcaaagccatctgcacggttctggttcaagaaggggcaaatgtgattatgaattatcggtccaatagacaagatgctctctcttatattaaaaaactaaatgacaattattcaggacatattattggtttttgtggtgatatgactatctcagagaatagagaaaggatttttgagacagcgctaaaagaatacggcagcatagatattctgattaataatgctgcatcatggacaacagctctggtagctgatatgccaaaagaagaatttgaacatgtcctggatgtgaatctgaccgtaccttttttaatgagtcaaaagttaatccagtatttaataaaatccgggaaaaggggcagtattatgaacgtagtgtcaaaagccgcgatcacaggttcagaaagaaatcatgcacattatgccgcttctaaagccggtcttgtaggatttacaaaatccctggcaaaagaaactgcttctgctgggatcacggtaaatgccatcgcccccggttatatgaaaacagagatgttaaataagtcttttaaaaatagggatgacgaggatcaacaagtcaaaaaaattccagtaggccggattgcagatcccattgaactggccaatgtggtggcattcatggtatctgaaaaagccagttattttacggggactgtatttaacggcactggcggaatgatcatgttctgacaatataggaaaggtgattttatgagccatgaagaaaaaaaggaattgttgtatatacaattaagagataagatcttagctgaatatcagcataaaccatactacgcgcctctgccaggagaacgagaactgtgtgaaatatatgcagtcagccgacctacagtccgaaaagcattagagatcttagaagaacaggggaaaatcgtaagattggcaggaaaaggagccttctttatcgggaacaaagactttattgaggcagacagcaataaaatgcagcccacgaatatcgcattctatgatcaagtttctctacggggcgattatacccgaagcaaagtgttgacagaaaaaattgagatggccagctatgaggtttcagcccggctgaaagcagagatcaattctaaagtttttcaccttgagcggttacggtacattaatgataaactgtattccctggctaattcttatatcttatatgacctttgcccggaattaaatgaatacgatttcagtgaccggtctctgcataaaactctctctgagcatggacatattccttacaaagcggataagaccatagagatctcaaaagccacagagtatgaatcacttcacttagatattgaaaccggagctcccatcacaatcacttcaagtattatttataataaagagggtgatatcttagaatacacaatttctaaatcagatgcatacaaaacattgataaaaatggatgtctttaataaatagcacaagggagcgtatttttagtctggaaaatacactccctttaattgaaactttcccttatttccgaaaacaagaaaaaagcgcctgcactgctactggcgcttttccctcatcacctgatccttgacatgatcctgattgtagacctgcatctgtatcaatgtcttatacgcatccgccctggtgaccgcatattccagcatattgccatgttcatcataggtgacggtagatgaaatggagatcgggtccccaggttttaaatccaggtgcatggcatcatactcggatgctttggaaatctcaatggtcttatcagccttaaacggtacatgaccatactggcacaatgtattgtgcagagaacggtcagaaaaatcatgctctgtcaattcaggacataactcatacggaatataggcattggccaaagagtataatttgccgttgatataccggagcctttctaaatgaaaaaccttggcatttttcggaagcctcagcatgactgcaacttccttgtctgcaatctcaatcttctgcaacaatactttactgctggtgtaatcgcccctcaggctgacctgattatagaatgcaatgtctgagaacttcatatcattgttggcatctacaaactccttattgccaatgaaaaacgcacctttcccggtaagccttataatacagccttcatcctccagaatctcaagagccttcctcacggtaggtctgctgacagaatagatatcacacagttcgcgttctcccggcaaaggagaatagtatggtttgtccttataatctgccaatatagaatccctcagctgcatataaagcagctgcttttttttcatttcactcatacgccctcctttgcataagaaacgtcgtttccttacaaatatttcatctgatatctctagtatacaccataaatcccgttggataaaagtggttttttaaatacgcatttgttcagaaaaaaagcaggaaaaaaccagtaaaaaccggctttctccctgccaaaactttgtccaaacagctgctgcaaaacaggtcagccacttctaaaatttgatcactactctgaacttatcgcctttaa

SEQ ID NO: 46 - DNA, 1879 bp, Anaerostipes rhamnosivorans
ctatataatatatttgattttctacttttaatctatgactatatctttttgcatccagaccatcaacttttatattactgattttgatttcccctacataatcatctctagattttatcccttcaatccatgtgtcaaatgaatatttatcagaaactaaccctcctgcatcataaacacacgagacatttagcataccatcactatgatcatctttatttttataatgaaaaaaattttcattacttgaatcatcaaactcccaatttgcaggagccttatatgtaaaatcgtcagcaaaagcatacgttttatagcttttgtattcatccttggctttacttgtttccttatgcgaacatccgctaacaataaaaacagcgaaaattaagggaataaccctcatcattaattttttcattgcgccttctccttaatgtaaaaagttaatagtttcatccctcttaagtgtattgatgtaaatataatgtaaattatggtaatctatataaagtttacacaaacaatgataaaagtagtaaaatacaataaaaataacaactagtaatgcaattagttaaattaggtcgctgcatttataaaaaacaaacaaatgttctggtttttgttgtaagcattctttttgtgcgttataataaatacaaacatacgtttgctgaatgaagggagagatacatatgataacaaaagattgtataaaactaattataaaagaattacctaacttatctgaagatgatattacttttatttataatcttataatggaaatggtgggacagaagaggggagcttaattgcttcccaaagccctggcgagatccaatattctttgcttgttatcatcgtttaaactatcatagtatatttttaataactcctgggcttgtatatcattcttaactttgtttgtaatatttgcaagttcataggaagacattatttcatttccctgactttcagaaggaacatcatttcccatgagccaagatatatcaacatctaatgcttttgctattttatacaagtttctttgctttggttcataatctccagatatattctcagaagcaaactttacaaggcctgcttttagggcaggatgatacggagccataatagattgtccgagaacggctgagagtaggacaatttatggtgctatgatatacagaccctccaggtgtccaatagaccgttgctacagttttcttctttgatgctttctttttgcgtgaaactttgatcttacatgtagcttttttgccggatctcataataactgtgatcttggcagtacctttcctttttgcctttacctttcccttttttgaaacggtggcaactcttttgttgctggatttccatttcttaactgaatcaccttttgcatatttgattttaagtttataagtttttgaaacttttaatttgactgtttttttcgtgaactttacatagggttttacctttgctgtctttttggtttgagttgcatagcacatcatgcattcgcgttttttcaatccggttttatggatggttgacttcttggtattataccagtcatcccacaagtgatcccccgtggcaggaacagtcctagtctggtcctcatagcaattaaagcagaaacgggattcctccccagtatttccgcagtcaggttcaattgtggtatcccattcgctccactcatgatggcagctattatctgcagttacaggcaaagcaggaaccaaaatcgcagctaccaggaaaaaacataacaactttttcttcataaaatacctcctctgtgttaaatttaaagtcacatccctcttgagtatgatgctaatatatataaatataacat

SEQ ID NO: 47 - DNA, 1668 bp, Anaerostipes rhamnosivorans
ttaatctccattccgccgcctttcagtcggcggcacaaatagtaatgaaagattttcaaaacctcaactccatgagataatagcttcaagaagctacactacaaagcacgggaggaggagttgtaaattctttctcgttttagacagcattttaatcagtgtaagttctgccttttcaagcacaaataagtggatctataagaccgtacactaagaattgttttaacgccttggttaaattgtgtggcagttcagtcaatggcttctcttatcttttttcagaaaggagtctgactatgaaagttacctacaaaacctgttgtggtgtcgatgttcacaaatcatttctcgttgccacaatcattactaccactggtggcattcaaccttcttatcagaagaaacgtttttccacctttaacaattcaattcttgagttcaagcattggcttctcgaaaatgactgccatgatgtctgtatggaatccaccggtaaatactgggttcctgtctttaatctattggaagatgaaatcaatgttaccatcgctaatcccaaatgggtaaaagctgtaaaaggcaacaaggatgacaccaaagattctaaatggattggagacttattccgtctcggacttgtgaagggcagctacatcccttgtaaaaaaatacgtattttaagagaatatacaagataccgctataagctggtttcctgccgttccagtgaaaagaatcgatatcagaatgcgcttactgtttgtaatgtcgctttagattctgttgtttccgatatctttgggaagtcatccacatccattattgactacctgcttgagcagactgacaattctatcaaccatgaagaaatcgcatccaaacttcttagacgtctcaaatccaaagaagatgctgtgattgaatccattgaaggatatcagatgactgatccccaaaaatatcgtatgcgcctcgtccgtgcacatatggattatatcacagctgaaatcaatgatgtagaccgtgaaatagaaaaattgatttcttctgaccctgattatgaaaatgctatccagttcctaatgactattccgggtgttaaacgtgatagtgcaatcactatcatctccgaaataggtattgatatgtctcagttctgctcttcaaaacgtttatgctgttgggctggtttagtccctggcagcaatgaatctggtggtaaaaagaaatctgttcggatcacacgtgctggagtttacctcaaacctgcattagtacaatgtgctcatgcagccgttaaatctgaaaagtctccttactacaaaaagaaatatgaatctcttatgaaacgccgtggcaagaaaagagccatagttgctatcgctcgtatgattctgactgcaatctaccagatgttatcaactggtgaagcttggaatccaagcgacttatacaaaattgatatgcctgaagctttacttgaaaaacaaaaagcaaaagccatcaagcaggctatgaagctattacaacgtgaaggactatatccaccactagaaccaatagcttcttaaattaattcctaaaatcaatacttcaaaaagttgccatttcttgacagcttaaatcagtgcgccactttttggctgtcctctactttctttcacacta

SEQ ID NO: 48 - DNA, 1628 bp, Anaerostipes rhamnosivorans
aggtagatagggcagaggtggaagtgcggcaacgtatggagctgactgttactaatcggtcgaggctttaaccaaagaaggtaaggaagatgtttgatgaaaggttctgtatgtagttttgaaggtacatataattagaaaaagggataaaaaataaaagtattttttatctttttgctgtataggggcatagttcagttggtagaataacggtctccaaaaccgcaggtcgagggttcaagtccttctgcccctgttaagaagtctaggaaataagccatttcctgggctttttattttgcgttaaaatacaataaaaccatctttcagactgaatttatttatcaactttacggtcacagacagcttgacgggcaagaatgctctcaatcatgtcagctaatgtcattaaatcagcagaaagtacagcaagttcgtcttctgataaacattctgaaatcttgcaggcaatggtcgaaagaaagtaaaggtttgagcaatccatggtggtttttacctcatagctttttattaggatatgttaaaaaccagggtatgtgataccataaaaggccggataaacccggcctttttgctcaaaactatttttccttggattctttgttcgtcggatacccatttccctgtgcatccattcctttatcatccagtgagatatcgtttgttttctttaatgcatggttggtaacaccagcttcataggagccttttgggattgtattgatttcttcatcgcctcttgcttttttcatgaggacctccttttcttgtgttggcagagccggggactaaccctctgactctgcaacgatttcttctaatacgcggatcagatcctggatcgtgtatagttttacaccgcgtttcagaatcgtatccttcaattcaatgctgagcgtttcaaattttggacgaagctcaggagaaacataagacatctttatcacctcatagactagtatgggcaatttcttcatttctcattaaataaataattcatatatgcctaaaatcaaaatgagcagaccggagattaatacggcatattttccaaaaatatcagaaagaaacttctttcccgccgccatacctgcagtcaggaagaacaggctgaagaaaaatgtaaggatagaggtgagaaagggatttaagcctgtgattcccgcaccaaagccaagacctagattatttaaggtcagagccatggaaagtgcgatcagggaagcgagcggcatggagtgccattttgtgcggggcgaggacagcgctttctcttctttttctgtcaaatcatccgggacatttttcttgaaaaaataatccatcatcatccagacgccgagaaaaataatgatcaggcagccaaatgtgttcgcagtggagatcgaaagaatactcaccagccattctccgagaaacatggagagaaaggtaccgatggatgtcagaaaagaaattgtgatattatctaaaatatgatacttacatccctttgtaccgtatgcagcaccaaggaaaaaggcatcaatattcgctgaaatcgaaaataaaatgatagataacagatgcatatgaaatccttttattttattgttttatatataata

SEQ ID NO: 49 - DNA, 1491 bp, Anaerostipes rhamnosivorans
cattcaacatacattggattattttataaagcaggtattttaggttttatttttggattatcgggattaatacaggtagtaatttctgtattaaataaatggagaagaaaaaagtattttattattgttttgtgtagtattataggagtgtttgggttactaatttttgaggacttggatggtgcaaattggtgtatcgctttgttttttatacttgttggagtattggagaatgatatgtgtaatacacagtttttaaaggaatagtatatggaagaaaatggttgaaggatctattcttcgactgttgaataaagaaagaatcactatatctcttgaatcatagggggaacagagttttttctcgttacggacattagtaatctattctttgcctttactttgttggactgttctcatctgcctctttgttatgaactattaataggtatgggaacctctgatagcttacaaaaacaacaccaattatagaaaggaaaggtatgtgtttaaacttttaaaaaacatcatacaaaatagaaaagatatgcaacaagatagaataagcacatttaataagagtaagatccttcaactgatatatttcgttggcgtttctttatattttatatattattggatgcatgtttcgcagttggatcagaaatatgttccaaaatacttattaggtatagcaataatttgttttattgtaaagatagtttttaccaggtatgaattatttgaagcagtttttgggggcgggttgctcttattaatgttttgctgttggaagatgtccggaagtattgattatccgttgaatgctatcttattgcttggattaaaaaatgtggacataaaagagttatttaaattattattttatgtagttatagtaagtgttagcattattatgacatggacacttttacataatttgcctggtattattcgagtgcaggattatggaagaggtggggtagaaacacgatttcaatttggttggtggcatcctaatagaggacattctgtattttttacaatcattgtactttttttgtcctcatattttaaaaagtgtaaatggtggatttttgtttgtttaattatatttaattatgaatgttttttattgactaaatctaaaacaggattcatagttactttgatttccattgtgtttttcttcttacttaagctaataaacaatggatttcatagaaaagtgttattttttttggctcagatgattaatattttgtgtattgttttttctatgattggtattggaattgtacctatcgcctcaggattacttgataaattaaacaaaattactaccggaagggttatgattgcaaaagcattttatgctgagtttggaatacacacttttggaacaagtttgggagggaaaatacctgatctagggattgcaagaactctcttagagtatggaattgtagtatttatattattgtatagcag

SEQ ID NO: 50 - DNA, 1406 bp, Anaerostipes rhamnosivorans
tataagaagatagacctagatatgtgaggtttaccacaaaagcaaaatgcccgtagagccgataaaataaggctttgcggacatttaagaagatataaaaagatagtcaaaaagacatatataatttagataaattgatatataatcatatccagttgatgaataaggcaactgtaatgtcttaacataattaccttgaaaatcatatactaagatcttgcttttggattctgacatacagtatagattttcttgaaagcattctaagcaatatatattactatatttaggattctgttctacgacaattttagcctccttaacatcacgtaaaacaaagtgattaaattcacccaatccaaaaaatacaacgatccatagaatagaaaagaaactaatacatcccagaatgttcaatattgagttttttatcatttaaactcattccttcctcaagaaaccagtacccatcttggcctttatctattaaaaacctccaaacacattctttaccaataccaaaacttatttcctaacctataattacaataatgcagccatcttcttgtttcttattaactttcctcgataattaaaaacaagcaatctcctcttcatagtatttaatatcttactggaagaataacttaaatcaattacaacataatccttataaaagttaatatccgtataatgttcattatttttaatgtacttttttatatcatgaaaacttaaaagtgagattattttttctttcttgcctgacttaatatttaaacggtaaaaatctgattttaaattgctatagtataaataaccattctcaatttttgctttttcatttagtaactcatcttctcttttaatatttttaaccagatacctttttttctttgttcttttattgtacaaaacaatatttgattcatctataattaagaattgtttcgaatctacataaccgatccacagtggcggctcattttgtgggcatctgacgattgatttggtctgttcatttatttctaagacctccttggagtacctattccaactatagagatacccatgatcaaaccgcaatatatcggacaaattttcttttaatactgtttttatttctccattttccagattctttttataaagataattcttttcttctttgaatgttgtttcttcaatgtttaaataatagatctcttttgaagagactgtatataatcctacttcttgtaatatttttctgcctgtgccaacaccctttaatttttttgagtataattcaatcccaggtccttctctaaaataattatagtatactttattgttctggactaccaacatatctccataggaataaaaaggaaacagacaattccctattaaatactctctattct

SEQ ID NO: 51 - DNA, 1199 bp, Anaerostipes rhamnosivorans
gtgtagcatctattcaagaaatttttaattttgaatttgaagataaaagtttaaatggtgttattgctgaatttggcaatcgtagaaatgtatatttatccataccgaaatatcaaagagaatatacatgggaagataataaaataaaaacttttgttgatgatatatatattaatagcaaatttcttggaatcatagtattagaaaagaatagaaaacataattgtctagatatagttgatggacagcaaagaattacgactctaatattggtttgtgtttgtctttataacattttacaaaaggaagaggaaacagtaaaagcgaatgaaattatggcagttctagaacatcaaaacaatcttattctttggaatgattcagttggaaagtttatacataaacgagaaaacgaattgtatataaacgtattagaagaggatgatatttatcgtcaaggtgctaaatttaaagaagcatatgacgttatatataaaaaaattaagtcatataaaagtgacattagtaaaagagagtggaagacaaaattaatccaaatggtgatgcacgtttttgattgtcaaatggtgctatttgtaaatgtaatatctaaaaatgagggatctatagaagaaatatacattgatattaatgaaaaggcccaaaggctggacgaagaaagtatctttaaaggctattgtttttcaaaaattaaagattcgtctatgcaagaaaatttaaaatgtcaatggattgatattaaacaagatttttataaaataaaagatttacattttaaagatttaagttcgctcttacataaatatcttttgataaaagagcgaactactagaatcagcgaacatttgcatattaatggaaagcattatcttgaagataaacatccttctgaaattgtacatttattaaaggaatttaatctttttgaaaaaaatctgtatatttataaaacaaatattgacagtaagacatacaggtttagtgatttagcaaaagttaaacgaactattgatgatgatttggacttccttaaaaaaatctccaattacatattatttgcaaaacaaaatatatataaattagccttcttacattatattgatgttaacttaacaatgactacaaaagtcagtcaagtagatttacagagtttctttagattatattacgtttatttc

SEQ ID NO: 52 - DNA, 1095 bp, Anaerostipes rhamnosivorans
aataggcaaattctatttcacaatttcatatctctatacacaaagcagttagtcttaggattgactgcttttttcatacctaaatttcagattggagtgatgaaatggtgtttgttagagctgttcactaagattatcggtgcataaaattttattgtggtgcagatatgaaaatgatataatgtggatatgaagaaacggacaaactagaatttgtcgagctggttagttcgagataattttgagtttgttaagatgtggtgcacttgatggaatcacaggtacgacatcatattatggaggatgaaatagatgataggtttgattgttgcgaggtcaaagaataatgttataggcaagaatggtaatataccatggaaaataaagggagaacaaaagcaatttagagagttaacaacgggtaatgtggttattatggggcgaaagtcttatgaagaaatcggtcatccgttgcctaatagaatgaatattgttgtttccaccacaacagagtatcaaggagataatttagtttcagttaaatcattagaagatgcattattattggctaaaggacgagatgtatacatatctggtggatatggactatttaaggaagctttgcaaatagtagataaaatgtatatcacagaagtagatttaaatattgaagatggagatacattctttccagaatttgatatcaatgattttgaagttttgataggggaaacacttggtgaggaagtgaaatatacgagaacattttatgtaaggaaaaatgaattgagtagattttggatttagggtgttttcataaatatattgctttttatgcatatataaattgttgtaagacaaatcccagtttgacaatttcatatccatacacacaaagcagttagtcttaggattgactgctttttaaaaagacaccatttaggtgtaatgatgtcttttgggtgttattttataggtcatatcaaggctcattcaatcgtggtaaattcgtggtaaaatgagttttttctatacttcaaaatacttgaaagtatagtgtttatgcggataatcgaaaattagatataaaattta

SEQ ID NO: 53 - DNA, 1408 bp, Faecalibacterium prausnitzii
ggcgtcctccttgcggttagactaccgacttcgggtccccccggctctcatggtgtgacgggcggtgtgtacaaggcccgggaacgtattcaccgcagcatgctgatctgcgattactagcaattccgacttcgtgcaggcgagttgcagcctgcagtccgaactgggacgttgtttctgagttttgctccacctcgcggtcttgcttctctttgtttaacgccattgtagtacgtgtgtagcccaagtcataaagggcatgatgatttgacgtcatccccaccttcctccgttttgtcaacggcagtctggccagagtcctcttgcgtagtaactgaccataagggttgcgctcgttgcgggacttaacccaacatctcacgacacgagctgacgacaaccatgcaccacctgtctctttgtccgaagaaaatactgtttccagcatcgtcaaggatgtcaagacttggtaaggttcttcgcgttgcgtcgaattaaaccacatactccactgcttgtgcgggcccccgtcaattcctttgagtttcaaccttgcggtcgtactccccaggtggattacttattgtgttaactgcggcactgaaggggtcaatcctccaacacctagtaatcatcgtttacagtgtggactaccagggtatctaatcctgtttgctacccacactttcgagcctcagcgtcagttggtgcccagtaggccgccttcgccactggtgttcctcccgatatctacgcattccaccgctacaccgggaattccgcctacctctgcactactcaagaaaaacagttttgaaagcagttcatgggttgagcccatggatttcacttccaacttgtcttcccgcctgcgctccctttacacccagtaattccggacaacgcttgtgacctacgttttaccgcggctgctggcacgtagttagccgtcacttccttgttgagtaccgtcattatcttcctcaacaacaggagtttacaatccgaagaccttcttcctccacgcggcgtcgctgcatcagggtttcccccattgtgcaatattccccactgctgcctcccgtaggagtctgggccgtgtctcagtcccaatgtggccgttcaacctctcagtccggctaccgatcgtcgccttggtgggccgttacctcaccaactagctaatcggacgcgaggccatctcaaagcggattgctccttttccctctacccgatgccgggtcgtgggcttatgcggtattagcagtcgtttccaactgttgtccccctctttgaggcaggttcctcacgcgttactcacccgttcgccactcgctcgagaaagcaagctctctctcgctcgttcgacttgcatgtgttaggcgcgccgccagcgttcgtcctgacc

SEQ ID NO: 54 - DNA, 1442 bp, Christensenella californii
tctctcctttcggttagccactggcttcgggtgctcccaacttccgtggtgtgacgggcggtgtgtacaaggcccgggaacgcattcaccgcgacatgctgattcgcgattactagcaactccgacttcatgtgggcgggttgcagcccacaatccgaactgggaccggctttttgagattcgcttacccttacggggtcgctgccctttgtaccggccattgtagcacgtgtgtagcccaagacataaggggcatgatgatttgacgtcgtccccaccttcctccgagttgtccccggcggtctcactagagttcccatctttacatgctggcaactagcaataagggttgcgctcgttgcgggacttaacccaacatctcacgacacgagctgacgacaaccatgcaccacctgtctctctgccccgaagggaacatgtatctctacatgcgtcagaggatgtcaagccttggtaaggttcttcgcgttgcttcgaattaaaccacatgctccgctgcttgtgcgggcccccgtcaattcctttgagtttcaaccttgcgatcgtactccccaggcgggatacttaatgcgtttgcttcggcacggaaccctatcgggccccacacctagtatccatcgtttacggcgtggactaccagggtatctaatcctgtttgctccccacgctttcgtgcctcagtgtcagttacagtccagaaagtcgccttcgccactggtgttcctcctaatatctacgcatttcaccgctacactaggaattccacttccctctcctgtactcaagtcacacagtttcaaatgcaaccccggggttaagccccggtctttcacatctgacttacatgaccacctacgcaccctttacgcccagtaattccggacaacgcttgctccctacgtattaccgcggctgctggcacgtagttagccggagcttcctcctatggtaccgtcatttgtttcgtcccataggacaaaggtttacaatccgaagaccttcttccctcacgcggcgttgctgggtcaggctttcgcccattgcccaatattccccactgctgcctcccgtaggagtctggaccgtgtctcagttccagtgtggccgttcaccctctcaggtcggctacccatcgttgacttggtgggccgttacctcaccaactatctaatgggacgcgagcccatcctgcatcgaataaatccttttacctcagttccatgcgaaaccgtggtctcatgcggtattagcagtcgtttccaactgttgtcccccgttgcagggcaggttgctcacgcgttactcacccgtccgccactaagtatactcacagttccacccgaaggcttcacaaagagcaacttcgttcgacttgcatgtgttaagcacgccgccagcgttcgtcctgagccatgatcaaa
